(19) United States
(12) Patent Application Publication
(10) Pub. No.: US 2008/0014579 A1
(43) Pub. Date: Jan. 17, 2008

(54) Gene expression profiling in colon cancers

(75) Inventors: Chunmei Liu, Cupertino, CA (US); John Palma, San Ramon, CA (US); Janet A. Warrington, Los Altos, CA (US)

Correspondence Address: AFFYMETRIX, INC;ATTN: CHIEF IP COUNSEL, LEGAL DEPT., 3420 CENTRAL EXPRESSWAY, SANTA CLARA, CA, 95051, US

(73) Assignee: Affymetrix, INC., Santa Clara, CA (US)

(21) Appl. No.: 10/777,860

(22) Filed: Feb. 11, 2004

Related U.S. Application Data
(60) Provisional application No. 60/446,893, filed on Feb. 11, 2003.

(51) Int. Cl. C12Q 1/68; C40B 20/04; C40B 30/00

(52) U.S. Cl. 435/6; 506/4; 506/7

(57) ABSTRACT

Sets of genetic markers for specific tumor classes are described, as well as methods of identifying a biological sample based on these markers. Genes that are differentially expressed between different stages of colorectal tumors are identified. Genes that are differentially expressed between tumors that have metastasized to the regional lymph nodes and tumors that have not metastasized to the regional lymph nodes are identified. Changes in gene expression pattern between two samples or between a sample and a control may be used to determine tumor stage. Also described are diagnostic, prognostic, and therapeutic screening uses for these markers, as well as oligonucleotide arrays comprising these markers.

### RELATED APPLICATIONS

[0001] The present application claims priority to U.S. Provisional Application No. 60/446,893 filed Feb. 11, 2003, the disclosure of which is incorporated herein by reference in its entirety.

### FIELD OF THE INVENTION

[0002] The methods of the invention relate generally to genes that are differentially expressed between different stage colorectal tumors and methods of using the same.

### REFERENCE TO SEQUENCE LISTING

[0003] The Sequence Listing submitted on compact disk is hereby incorporated by reference. The file on the disk is named 3581seq1.txt, the file is 137 MB and the date of creation is Feb. 11, 2004.

### BACKGROUND

[0004] Many cellular events and processes are characterized by altered expression levels of one or more genes. Differences in gene expression correlate with many physiological processes such as cell cycle progression, cell differentiation and cell death. Changes in gene expression patterns also correlate with changes in disease or pharmacological state. For example, the lack of sufficient expression of functional tumor suppressor genes and/or the over expression of oncogene/protooncogenes could lead to tumorgenesis (Marshall, Cell, 64:313-326 (1991); Weinberg, Science, 254:1138-1146 (1991), incorporated herein by reference for all purposes). Thus, changes in the expression levels of particular genes (e.g. oncogenes or tumor suppressors) serve as signposts for different physiological, pharmacological and disease states.

[0005] Classification of biological samples from individuals is not an exact science. In many instances, accurate diagnosis and safe and effective treatment of a disorder depend on being able to discern biological distinctions among cell or tissue samples such as the stage of a tumor. The classification of a sample from an individual into particular disease classes has often proven to be difficult, incorrect, or equivocal. Typically, using traditional methods such as histochemical analysis, immunophenotyping, and cytogenetic analysis, only one or two characteristics of the sample are analyzed to determine the sample's classification. Inaccurate results can lead to incorrect diagnoses and potentially ineffective or harmful treatment. Thus a need exists for an accurate and efficient method for identifying tumor types and differentiating between different stages of tumors.

### SUMMARY OF THE INVENTION

[0006] The present invention is a method to analyze colorectal tumor samples to differentiate between tumors that have metastasized from tumors that have not metastasized using gene expression profiles. In one embodiment tumors that have invaded the lymph nodes are distinguished from tumors that have not (Dukes' C versus Dukes' B) based on gene expression pattern. A collection of genes that have been identified as being differentially expressed in Dukes' C versus Dukes' B stage tumors is disclosed. The genes may be used individually or in groups of 2, 5, 10, 25, 50 or more to analyze tissues of unknown state. For example, the genes may be used to stage tumors, to predict treatment outcome, to assist in the design of new drugs or treatment regimens or as drug targets.

[0007] In one embodiment a method of classifying a colorectal tumor is disclosed. The method comprises obtaining a sample of cells derived from a colorectal tumor; isolating a gene expression product from at least one informative gene from one or more cells in the sample; determining a gene expression profile of at least one informative gene in the sample; and comparing the gene expression profile of the at least one informative gene in the sample to the gene expression profile of the at least one informative gene in at least one sample of known classification wherein the gene expression profile is correlated with a specific colorectal tumor type. The tumor type may be selected from the group consisting of Dukes' A, B, C or D stage colorectal tumors. The tumor may or may not have regional lymph node metastasis. The expression product may be total RNA, mRNA or proteins. The gene expression profile may be determined using an array of nucleic acid probes. Informative genes may be selected from the group consisting of the genes in Tables 2-3.

[0008] In one embodiment a method of identifying compounds that inhibit or promote metastasis of a colorectal tumor to the regional lymph nodes is disclosed. The method comprises obtaining samples of cells from a colorectal tumor before and after treatment; isolating a gene expression product from the samples and determining an expression profile for at least one gene in Tables 2 and 3; comparing the direction of change between the samples to the direction of change in Tables 2 and 3 and identifying the compound as a promoter of metastasis if the direction of change is the same as the direction of change for that at least one informative gene from Dukes' B to Dukes' C in Tables 2 and 3 or as an inhibitor of metastasis if the direction of change is the opposite of the direction of change in Tables 2 and 3.

[0009] In another embodiment gene expression profiles of the genes in Tables 2 and 3 are used to predicting the efficacy of a compound for treating a colorectal tumor. Samples are collected before and after treatment with the compound and the expression profile for at least one gene in Tables 2 and 3 is determined. The change in the expression profile from the treated to the untreated is compared to the change in expression profile between Dukes' B and Dukes' C stage tumors, for example, using Tables 2-3. The direction of change, up or down, is compared.

[0010] In another embodiment a method for classifying malignant colon cells is disclosed. In another embodiment a colorectal tumor is classified as being positive or negative for regional lymph node metastases based on the information in Tables 2-3 and comparison of expression profiles.

### DETAILED DESCRIPTION

### A. General

[0011] The present invention has many preferred embodiments and relies on many patents, applications and other references for details known to those of the art. Therefore, when a patent, application, or other reference is cited or repeated below, it should be understood that it is incorporated by reference in its entirety for all purposes as well as for the proposition that is recited.

[0012] As used in this application, the singular form “a,” “an,” and “the” include plural references unless the context clearly dictates otherwise. For example, the term “an agent” includes a plurality of agents, including mixtures thereof.

[0013] An individual is not limited to a human being but may also be other organisms including but not limited to mammals, plants, bacteria, or cells derived from any of the above.

[0014] Throughout this disclosure, various aspects of this invention can be presented in a range format. It should be understood that the description in range format is merely for convenience and brevity and should not be construed as an inflexible limitation on the scope of the invention. Accordingly, the description of a range should be considered to have specifically disclosed all the possible subranges as well as individual numerical values within that range. For example, description of a range such as from 1 to 6 should be considered to have specifically disclosed subranges such as from 1 to 3, from 1 to 4, from 1 to 5, from 2 to 4, from 2 to 6, from 3 to 6 etc., as well as individual numbers within that range, for example, 1, 2, 3, 4, 5, and 6. This applies regardless of the breadth of the range.

[0015] The practice of the present invention may employ, unless otherwise indicated, conventional techniques and descriptions of organic chemistry, polymer technology, molecular biology (including recombinant techniques), cell biology, biochemistry, and immunology, which are within the skill of the art. Such conventional techniques include polymer array synthesis, hybridization, ligation, and detection of hybridization using a label. Specific illustrations of suitable techniques can be had by reference to the example herein below. However, other equivalent conventional procedures can, of course, also be used. Such conventional techniques and descriptions can be found in standard laboratory manuals such as Genome Analysis: A Laboratory Manual Series (Vols. I-IV), Using Antibodies: A Laboratory Manual, Cells: A Laboratory Manual, PCR Primer: A Laboratory Manual, and Molecular Cloning: A Laboratory Manual (all from Cold Spring Harbor Laboratory Press), Stryer, L. (1995) Biochemistry (4th Ed.) Freeman, New York, Gait, “Oligonucleotide Synthesis: A Practical Approach” 1984, IRL Press, London, Nelson and Cox (2000), Lehninger, Principles of Biochemistry 3^{rd} Ed., W. H. Freeman Pub., New York, N.Y. and Berg et al. (2002) Biochemistry, 5^{th} Ed., W. H. Freeman Pub., New York, N.Y., all of which are herein incorporated in their entirety by reference for all purposes.

[0016] The present invention can employ solid substrates, including arrays in some preferred embodiments. Methods and techniques applicable to polymer (including protein) array synthesis have been described in U.S. Ser. No. 09/536,841, WO 00/58516, U.S. Pat. Nos. 5,143,854, 5,242,974, 5,252,743, 5,324,633, 5,384,261, 5,405,783, 5,424,186, 5,451,683, 5,482,867, 5,491,074, 5,527,681, 5,550,215, 5,571,639, 5,578,832, 5,593,839, 5,599,695, 5,624,711, 5,631,734, 5,795,716, 5,831,070, 5,837,832, 5,856,101, 5,858,659, 5,936,324, 5,968,740, 5,974,164, 5,981,185, 5,981,956, 6,025,601, 6,033,860, 6,040,193, 6,090,555, 6,136,269, 6,269,846 and 6,428,752, in PCT Applications Nos. PCT/US99/00730 (International Publication Number WO 99/36760) and PCT/US01/04285, which are all incorporated herein by reference in their entirety for all purposes.

[0017] Patents that describe synthesis techniques in specific embodiments include U.S. Pat. Nos. 5,412,087, 6,147,205, 6,262,216, 6,310,189, 5,889,165, and 5,959,098. Nucleic acid arrays are described in many of the above patents, but the same techniques are applied to polypeptide arrays.

[0018] Nucleic acid arrays that are useful in the present invention include those that are commercially available from Affymetrix (Santa Clara, Calif.) under the brand name GeneChip®. Example arrays are shown on the website at affymetrix.com.

[0019] The present invention also contemplates many uses for polymers attached to solid substrates. These uses include gene expression monitoring, profiling, library screening, genotyping and diagnostics. Gene expression monitoring, and profiling methods can be shown in U.S. Pat. Nos. 5,800,992, 6,013,449, 6,020,135, 6,033,860, 6,040,138, 6,177,248 and 6,309,822. Genotyping and uses therefore are shown in U.S. Ser. No. 60/319,253, 10/013,598, and U.S. Pat. Nos. 5,856,092, 6,300,063, 5,858,659, 6,284,460, 6,361,947, 6,368,799 and 6,333,179. Other uses are embodied in U.S. Pat. Nos. 5,871,928, 5,902,723, 6,045,996, 5,541,061, and 6,197,506.

[0020] The present invention also contemplates sample preparation methods in certain preferred embodiments. Prior to or concurrent with genotyping, the genomic sample may be amplified by a variety of mechanisms, some of which may employ PCR. See, e.g., PCR Technology: Principles and Applications for DNA Amplification (Ed. H. A. Erlich, Freeman Press, NY, N.Y., 1992); PCR Protocols: A Guide to Methods and Applications (Eds. Innis, et al., Academic Press, San Diego, Calif., 1990); Mattila et al., Nucleic Acids Res. 19, 4967 (1991); Eckert et al., PCR Methods and Applications 1, 17 (1991); PCR (Eds. McPherson et al., IRL Press, Oxford); and U.S. Pat. Nos. 4,683,202, 4,683,195, 4,800,159 4,965,188, and 5,333,675, and each of which is incorporated herein by reference in their entireties for all purposes. The sample may be amplified on the array. See, for example, U.S. Pat. No. 6,300,070 and U.S. patent application Ser. No. 09/513,300, which are incorporated herein by reference.

[0021] Other suitable amplification methods include the ligase chain reaction (LCR) (e.g., Wu and Wallace, Genomics 4, 560 (1989), Landegren et al., Science 241, 1077 (1988) and Barringer et al. Gene 89:117 (1990)), transcription amplification (Kwoh et al., Proc. Natl. Acad. Sci. USA 86, 1173 (1989) and WO88/10315), self-sustained sequence replication (Guatelli et al., Proc. Nat. Acad. Sci. USA, 87, 1874 (1990) and WO90/06995), selective amplification of target polynucleotide sequences (U.S. Pat. No. 6,410,276), consensus sequence primed polymerase chain reaction (CP-PCR) (U.S. Pat. No. 4,437,975), arbitrarily primed polymerase chain reaction (AP-PCR) (U.S. Pat. No. 5,413,909, 5,861,245) and nucleic acid based sequence amplification (NABSA). (See, U.S. Pat. Nos. 5,409,818, 5,554,517, and 6,063,603, each of which is incorporated herein by reference). Other amplification methods that may be used are described in, U.S. Pat. Nos. 5,242,794, 5,494,810, 4,988,617 and in U.S. Ser. No. 09/854,317, each of which is incorporated herein by reference.

[0022] Additional methods of sample preparation and techniques for reducing the complexity of a nucleic sample are described in Dong et al., Genome Research 11, 1418 (2001), in U.S. Pat. Nos. 6,361,947, 6,391,592 and U.S. patent application Ser. Nos. 09/916,135, 09/920,491, 09/910,292, and 10/013,598.

[0023] Methods for conducting polynucleotide hybridization assays have been well developed in the art. Hybridization assay procedures and conditions will vary depending on the application and are selected in accordance with the general binding methods known including those referred to in: Maniatis et al. Molecular Cloning: A Laboratory Manual (2^{nd} Ed. Cold Spring Harbor, N.Y., 1989); Berger and Kimmel Methods in Enzymology, Vol. 152, Guide to Molecular Cloning Techniques (Academic Press, Inc., San Diego, Calif., 1987); Young and Davism, P.N.A.S, 80:1194 (1983). Methods and apparatus for carrying out repeated and controlled hybridization reactions have been described in U.S. Pat. Nos. 5,871,928, 5,874,219, 6,045,996 and 6,386,749, 6,391,623 each of which are incorporated herein by reference

[0024] The present invention also contemplates signal detection of hybridization between ligands in certain preferred embodiments. See U.S. Pat. Nos. 5,143,854, 5,578,832; 5,631,734; 5,834,758; 5,936,324; 5,981,956; 6,025,601; 6,141,096; 6,185,030; 6,201,639; 6,218,803; and 6,225,625, in U.S. patent application Ser. No. 60/364,731 and in PCT Application PCT/US99/06097 (published as WO99/47964), each of which also is hereby incorporated by reference in its entirety for all purposes.

[0025] Methods and apparatus for signal detection and processing of intensity data are disclosed in, for example, U.S. Pat. Nos. 5,143,854, 5,547,839, 5,578,832, 5,631,734, 5,800,992, 5,834,758; 5,856,092, 5,902,723, 5,936,324, 5,981,956, 6,025,601, 6,090,555, 6,141,096, 6,185,030, 6,201,639; 6,218,803; and 6,225,625, in U.S. patent application Ser. No. 60/364,731 and in PCT Application PCT/US99/06097 (published as WO99/47964), each of which also is hereby incorporated by reference in its entirety for all purposes.

[0026] The practice of the present invention may also employ conventional biology methods, software and systems. Computer software products of the invention typically include computer readable medium having computer-executable instructions for performing the logic steps of the method of the invention. Suitable computer readable medium include floppy disk, CD-ROM/DVD/DVD-ROM, hard-disk drive, flash memory, ROM/RAM, magnetic tapes and etc. The computer executable instructions may be written in a suitable computer language or combination of several languages. Basic computational biology methods are described in, e.g. Setubal and Meidanis et al., Introduction to Computational Biology Methods (PWS Publishing Company, Boston, 1997); Salzberg, Searles, Kasif, (Ed.), Computational Methods in Molecular Biology, (Elsevier, Amsterdam, 1998); Rashidi and Buehler, Bioinformatics Basics: Application in Biological Science and Medicine (CRC Press, London, 2000) and Ouelette and Bzevanis Bioinformatics: A Practical Guide for Analysis of Gene and Proteins (Wiley & Sons, Inc., 2^{nd} ed., 2001).

[0027] The present invention may also make use of various computer program products and software for a variety of purposes, such as probe design, management of data, analysis, and instrument operation. See, U.S. Pat. Nos. 5,593,839, 5,795,716, 5,733,729, 5,974,164, 6,066,454, 6,090,555, 6,185,561, 6,188,783, 6,223,127, 6,229,911 and 6,308,170.

[0028] Additionally, the present invention may have preferred embodiments that include methods for providing genetic information over networks such as the Internet as shown in U.S. patent application Ser. Nos. 10/063,559, 60/349,546, 60/376,003, 60/394,574, 60/403,381.

[0029] A nucleic acid sample may be obtained by any method known in the art. One of skill in the art will appreciate that it is desirable to have nucleic samples containing target nucleic acid sequences that reflect the transcripts of interest. Therefore, suitable nucleic acid samples may contain transcripts of interest. Suitable nucleic acid samples, however, may contain nucleic acids derived from the transcripts of interest. As used herein, a nucleic acid derived from a transcript refers to a nucleic acid for whose synthesis the mRNA transcript or a subsequence thereof has ultimately served as a template. Thus, a cDNA reverse transcribed from a transcript, an RNA transcribed from that cDNA, a DNA amplified from the cDNA, an RNA transcribed from the amplified DNA, etc., are all derived from the transcript and detection of such derived products is indicative of the presence and/or abundance of the original transcript in a sample. Thus, suitable samples include, but are not limited to, transcripts of the gene or genes, cDNA reverse transcribed from the transcript, cRNA transcribed from the cDNA, DNA amplified from the genes, RNA transcribed from amplified DNA, and the like. Transcripts, as used herein, may include, but not limited to pre-mRNA nascent transcript(s), transcript processing intermediates, mature mRNA(s) and degradation products. It is not necessary to monitor all types of transcripts to practice this invention. For example, one may choose to practice the invention to measure the mature mRNA levels only.

[0030] In one embodiment, such sample is a homogenate of cells or tissues or other biological samples. Preferably, such sample is a total RNA preparation of a biological sample. More preferably in some embodiments, such a nucleic acid sample is the total mRNA isolated from a biological sample. Those of skill in the art will appreciate that the total mRNA prepared with most methods includes not only the mature mRNA, but also the RNA processing intermediates and nascent pre-mRNA transcripts. For example, total mRNA purified with poly (T) column contains RNA molecules with poly (A) tails. Those poly A+RNA molecules could be mature mRNA, RNA processing intermediates, nascent transcripts or degradation intermediates.

[0031] Biological samples may be of any biological tissue or fluid or cells. Frequently the sample will be a “clinical sample” which is a sample derived from a patient. Clinical samples provide rich sources of information regarding the various states of genetic network or gene expression. Some embodiments of the invention are employed to detect mutations and to identify the function of mutations. Such embodiments have extensive applications in clinical diagnostics and clinical studies. Typical clinical samples include, but are not limited to, sputum, blood, blood cells (e.g., white cells), tissue or fine needle biopsy samples, urine, peritoneal fluid, and pleural fluid, or cells therefrom. Biological samples may also include sections of tissues such as frozen sections taken for histological purposes.

[0032] Another typical source of biological samples is cell cultures where gene expression states can be manipulated to explore the relationship among genes. In one aspect of the invention, methods are provided to generate biological samples reflecting a wide variety of states of the genetic network.

[0033] One of skill in the art would appreciate that in some embodiments it is desirable to inhibit or destroy RNase present in homogenates before homogenates can be used for hybridization. Methods of inhibiting or destroying nucleases are well known in the art. In some preferred embodiments, cells or tissues are homogenized in the presence of chaotropic agents to inhibit nuclease. In some other embodiments, RNases are inhibited or destroyed by heat treatment followed by proteinase treatment.

[0034] Methods of isolating total mRNA are also well known to those of skill in the art. For example, methods of isolation and purification of nucleic acids are described in detail in Chapter 3 of Laboratory Techniques in Biochemistry and Molecular Biology: Hybridization With Nucleic Acid Probes, Part I. Theory and Nucleic Acid Preparation, P. Tijssen, ed. Elsevier, N.Y. (1993) which is incorporated herein by reference.

[0035] In a preferred embodiment, the total RNA is isolated from a given sample using, for example, an acid guanidinium-phenol-chloroform extraction method and polyA⁺ mRNA is isolated by oligo dT column chromatography or by using (dT)n magnetic beads (see, e.g., Sambrook et al., Molecular Cloning: A Laboratory Manual (2nd ed.), Vols. 1-3, Cold Spring Harbor Laboratory, (1989), or Current Protocols in Molecular Biology, F. Ausubel et al., ed. Greene Publishing and Wiley-Interscience, New York (1987)). See also PCT/US99/25200 for complexity management and other sample preparation techniques, which is hereby incorporated by reference in its entirety.

[0036] Frequently, it is desirable to amplify the nucleic acid sample prior to hybridization. One of skill in the art will appreciate that whatever amplification method is used, if a quantitative result is desired, care must be taken to use a method that maintains or controls for the relative frequencies of the amplified nucleic acids to achieve quantitative amplification.

[0037] Methods of “quantitative” amplification are well known to those of skill in the art. For example, quantitative PCR involves simultaneously co-amplifying a known quantity of a control sequence using the same primers. This provides an internal standard that may be used to calibrate the PCR reaction. The high density array may then include probes specific to the internal standard for quantification of the amplified nucleic acid.

[0038] Cell lysates or tissue homogenates often contain a number of inhibitors of polymerase activity. Therefore, RT-PCR typically incorporates preliminary steps to isolate total RNA or mRNA for subsequent use as an amplification template. One tube mRNA capture methods may be used to prepare poly(A)+ RNA samples suitable for immediate RT-PCR in the same tube (Boehringer Mannheim). The captured mRNA can be directly subjected to RT-PCR by adding a reverse transcription mix and, subsequently, a PCR mix. In a particularly preferred embodiment, the sample mRNA is reverse transcribed with a reverse transcriptase and a primer consisting of oligo dT and a sequence encoding the phage T7 promoter to provide single stranded DNA template. The second DNA strand is polymerized using a DNA polymerase. After synthesis of double-stranded cDNA, T7 RNA polymerase is added and RNA is transcribed from the cDNA template. Successive rounds of transcription from each single cDNA template result in amplified RNA. Methods of in vitro polymerization are well known to those of skill in the art (see, e.g., Sambrook, supra).

[0039] It will be appreciated by one of skill in the art that the direct transcription method described above provides an antisense (aRNA) pool. Where antisense RNA is used as the target nucleic acid, the oligonucleotide probes provided in the array are chosen to be complementary to subsequences of the antisense nucleic acids. Conversely, where the target nucleic acid pool is a pool of sense nucleic acids, the oligonucleotide probes are selected to be complementary to subsequences of the sense nucleic acids. Finally, where the nucleic acid pool is double stranded, the probes may be of either sense as the target nucleic acids include both sense and antisense strands.

[0040] The protocols cited above include methods of generating pools of either sense or antisense nucleic acids. Indeed, one approach can be used to generate either sense or antisense nucleic acids as desired. For example, the cDNA can be directionally cloned into a vector (e.g., Stratagene's p Bluscript II KS (+) phagemid) such that it is flanked by the T3 and T7 promoters. In vitro transcription with the T3 polymerase will produce RNA of one sense (the sense depending on the orientation of the insert), while in vitro transcription with the T7 polymerase will produce RNA having the opposite sense. Other suitable cloning systems include phage lambda vectors designed for Cre-loxP plasmid subcloning (see e.g., Palazzolo et al., Gene, 88: 25-36 (1990)).

[0041] Other analysis methods that can be used in the present invention include electrochemical denaturation of double stranded nucleic acids, U.S. Pat. No. 6,045,996 and 6,033,850, the use of multiple arrays (arrays of arrays), U.S. Pat. No. 5,874,219, the use of scanners to read the arrays, U.S. Pat. Nos. 5,631,734; 5,744,305; 5,981,956 and 6,025,601, methods for mixing fluids, U.S. Pat. No. 6,050,719, integrated device for reactions, U.S. Pat. No. 6,043,080, integrated nucleic acid diagnostic device, U.S. Pat. No. 5,922,591, and nucleic acid affinity columns, U.S. Pat. No. 6,013,440. All of the above patents are hereby incorporated by reference in their entireties.

### B. Definitions

[0042] An array comprises a solid support with peptide or nucleic acid probes attached to the support. Arrays typically comprise a plurality of different nucleic acid or peptide probes that are coupled to a surface of a substrate in different, known locations. These arrays, also described as “microarrays” or colloquially “chips” have been generally described in the art, for example, U.S. Pat. Nos. 5,143,854, 5,445,934, 5,744,305, 5,677,195, 6,040,193, 5,424,186 and Fodor et al., Science, 251:767-777 (1991). Each of which is incorporated by reference in its entirety for all purposes. These arrays may generally be produced using mechanical synthesis methods or light directed synthesis methods which incorporate a combination of photolithographic methods and solid phase synthesis methods. Techniques for the synthesis of these arrays using mechanical synthesis methods are described in, e.g., U.S. Pat. No. 5,384,261, incorporated herein by reference in its entirety for all purposes. Although a planar array surface is preferred, the array may be fabricated on a surface of virtually any shape or even a multiplicity of surfaces. Arrays may be peptides or nucleic acids on beads, gels, polymeric surfaces, fibers such as fiber optics, glass or any other appropriate substrate, see U.S. Pat. Nos. 5,770,358, 5,789,162, 5,708,153, 6,040,193 and 5,800,992, which are hereby incorporated in their entirety for all purposes. Arrays may be packaged in such a manner as to allow for diagnostics or other manipulation of an all inclusive device, see for example, U.S. Pat. Nos. 5,856,174 and 5,922,591 incorporated in their entirety by reference for all purposes. See also U.S. patent application Ser. No. 09/545,207, filed Apr. 7, 2000 for additional information concerning arrays, their manufacture, and their characteristics. It is hereby incorporated by reference in its entirety for all purposes.

[0043] A sample may or may not be affected with a disease state. According to the present invention, a disease state or disease status refers to any abnormal biological state of a cell. This includes but is not limited to an interruption, cessation or disorder of body functions, systems or organs. In general, a disease state will be detrimental to a biological system. With respect to the present invention, any biological state, such as a premalignancy state or malignancy state that is associated with a disease or disorder is considered to be a disease state. A pathological state is the equivalent of a disease state.

[0044] Disease states can be further categorized into different levels of disease state. As used in the present invention, the level of a disease or disease state is a measure reflecting the progression of a disease or disease state. Generally, a disease or disease state will progress through a plurality of levels or stages, wherein the affects of the disease become increasingly severe, for example, Dukes' A, B, C or D stage. A disease state may be determined by a variety of methods including any method known in the art. Disease state may be determined for example by histological analysis of the affected tissue, by the presence or absence of one or more gene product or by the expression pattern of one or more genes.

[0045] In order to alleviate or alter a disease state, a therapy or therapeutic regimen is often undertaken. A therapy or therapeutic regimen, as used herein, refers to a course of treatment intended to reduce or eliminate the affects or symptoms of a disease or to prevent progression of a disease from one state to a second more detrimental state. A therapeutic regimen will typically comprise, but is not limited to, a prescribed dosage of one or more drugs, surgery or radiation treatment. Therapies, ideally, will be beneficial and reduce the disease state but in many instances the effect of a therapy will have non-desirable effects as well. The effect of therapy will also be impacted by the physiological state of the sample. The genotype of the patient may also impact the side effects and efficacy of a selected therapy. Genotype may be used to determine which therapy or therapeutic regimen is likely to me most effective.

[0046] Treatment with drugs may affect the pharmacological state of a sample. The pharmacological state or pharmacological status of a sample relates to changes in the biological status following drug treatment. Some of the changes following drug treatment or surgery may be relevant to the disease state. Some may be unrelated-side effects of the therapy. Some will be specific to physiological state. Indicators of pharmacological state include, but are not limited to, duration of therapy, types and doses of drugs prescribed, degree of compliance with a given course of therapy, and/or unprescribed drugs ingested.

[0047] One measurement of cellular constituents that is particularly useful in the present invention is the expression profile or gene expression profile. As used herein, an expression profile comprises measurement of the relative abundance of a plurality of cellular constituents. Such measurements may include RNA or protein abundances or activity levels. The expression level of a gene is the abundance of the mRNA of that gene from a sample. The expression level may be a normalized value. The expression profile can be a measurement for example of the transcriptional state or the translational state of two or more genes. See U.S. Pat. Nos. 6,040,138, 5,800,992, 6,020135, 6,033,860 and U.S. Ser. No. 09/341,302 which are hereby incorporated by reference in their entireties. See also Sharan et al. Ernst Schering Res Found Workshop. 2002;(38):83-108 which is incorporated herein by reference in its entirety. A gene expression profile may include expression levels of genes that are not informative, as well as informative genes. Phenotype classification can be made by comparing the gene expression profile of the sample with respect to one or more informative genes with one or more gene expression profiles (e.g., in a database). Using the methods described herein, expression of numerous genes can be measured simultaneously. The assessment of numerous genes provides for a more accurate evaluation of the sample because there are more genes that can assist in classifying the sample. A gene expression profile may involve only those genes that are increased in expression in a sample, only those genes that are decreased in expression in a sample, or a combination of genes that are increased and decreased in expression in a sample.

[0048] As used herein informative gene refers to a gene whose expression correlates with a particular phenotype. Expression profiles obtained for informative genes can be used to determine, for example, the presence or absence of a Dukes' C tumor or if a candidate compound increases or decreases gene expression in a sample. Samples can be classified according to their broad expression profile, or according to the expression levels of particular informative genes. The genes that are relevant for classification are referred to herein as “informative genes”. Not all informative genes for a particular class distinction must be assessed in order to classify a sample. Similarly, the set of informative genes that characterize one phenotypic effect may or may not be the same as the set of informative genes for a different phenotype effect. For example, a subset of the informative genes that demonstrate a high correlation with a class distinction can be used in classifying the presence of a Dukes' C tumor or predicting metastasis. This subset can be, for example, 1, 2, 3, 5, 10, 25, or 50 or more genes. Typically the accuracy of the classification increases with the number of informative genes that are assessed. Informative genes include but are not limited to the particular genes shown in Tables 2 and 3.

[0049] Direction of change is an indication of whether a gene is expressed at a higher or lower level in a first sample compared to a second sample. If a gene is expressed at a higher level in a first sample when compared to a second sample or collection of samples the direction of change is up indicating an increase in expression in the first sample relative to the second. If a gene is expressed at a lower level in a first sample when compared to a second sample or collection of samples the direction of change is down indicating a decrease in expression in the first sample relative to the second. In Tables 2-3 if the direction of change is up this indicates that the expression of that gene in the Dukes' C samples is increased relative to the expression of that gene in the Dukes' B samples. If the direction of change is down this indicates that the expression of that gene in the Dukes' C samples is decreased relative to the expression of that gene in the Dukes' B samples.

[0050] The magnitude of the change is the fold change. In Tables 2 and 3 fold change is expressed as the ratio of the expression level of the sample that is expressed at a higher level to the expression level of the sample that is expressed at a lower level. If the gene is up regulated in C compared to B the fold change number given is C/B if the gene is down regulated in C compared to B the fold change number given is B/C so that the magnitude of the difference can be compared.

[0051] The cellular constituent can be either up regulated in the experimental relative to the reference or down regulated in the experimental relative to the reference. Differential gene expression can also be used to distinguish between cell types, tissue types or nucleic acids. See U.S. Pat. Nos. 5,800,992, 6,020,153, 6,033,860, 6,171,798, 6,391,550, 6,548,257, and 6,576,424, which are each incorporated herein by reference in their entireties.

[0052] The gene expression value measured or assessed is a numeric value obtained from an apparatus that can measure gene expression levels which may be normalized. Gene expression levels refer to the amount of expression of the gene expression product. Such data is obtained, for example, from a GeneChip® probe array or microarray (Affymetrix, Inc.) and the expression levels are calculated with software. (See the GeneChip® Expression Analysis Technical Manual, Affymetrix, Inc. 2002, which is incorporated herein by reference in its entirety for all purposes).

[0053] The transcriptional state of a sample includes the identities and relative abundances of the RNA species, especially mRNAs present in the sample. Preferably, a substantial fraction of all constituent RNA species in the sample are measured, but at least, a sufficient fraction is measured to characterize the state of the sample. Transcriptional state can be conveniently determined by measuring transcript abundances by any of several existing gene expression technologies.

[0054] Translational state includes the identities and relative abundances of the constituent protein species in the sample. As is known to those of skill in the art, the transcriptional state and translational state are related.

[0055] The gene expression monitoring system, in a preferred embodiment, may comprise a nucleic acid probe array (such as those described above), membrane blot (such as used in hybridization analysis such as Northern, Southern, dot, and the like), or microwells, sample tubes, gels, beads or fibers (or any solid support comprising bound nucleic acids). See U.S. Pat. Nos. 5,770,722, 5,874,219, 5,744,305, 5,677,195 and 5,445,934, which are expressly incorporated herein by reference. The gene expression monitoring system may also comprise nucleic acid probes in solution. The gene expression monitoring system according to the present invention may be used to facilitate a comparative analysis of expression in different cells or tissues, different subpopulations of the same cells or tissues, different disease states of the same cells or tissue, different developmental stages of the same cells or tissue, or different cell populations of the same tissue. See U.S. Pat. No. 6,033,860 and U.S. patent application Ser. Nos. 09/102,167, 09/734,752 and 10/222,206.

[0056] Complementary or substantially complementary refers to the hybridization or base pairing between nucleotides or nucleic acids, such as, for instance, between the two strands of a double stranded DNA molecule or between an oligonucleotide primer and a primer binding site on a single stranded nucleic acid to be sequenced or amplified. Complementary nucleotides are, generally, A and T (or A and U), or C and G. Two single stranded RNA or DNA molecules are the to be substantially complementary when the nucleotides of one strand, optimally aligned and compared and with appropriate nucleotide insertions or deletions, pair with at least about 80% of the nucleotides of the other strand, usually at least about 90% to 95%, and more preferably from about 98 to 100%. Alternatively, substantial complementary exists when an RNA or DNA strand will hybridize under selective hybridization conditions to its complement. Typically, selective hybridization will occur when there is at least about 65% complementary over a stretch of at least 14 to 25 nucleotides, preferably at least about 75%, more preferably at least about 90% complementary. See, M. Kanehisa Nucleic Acids Res. 12:203 (1984), incorporated herein by reference. Effective amount refers to an amount sufficient to induce a desired result.

[0057] Genome is all the genetic material in the chromosomes of an organism. DNA derived from the genetic material in the chromosomes of a particular organism is genomic DNA. A genomic library is a collection of clones made from a set of randomly generated overlapping DNA fragments representing the entire genome of an organism.

[0058] The term hybridization refers to the process in which two single-stranded polynucleotides bind non-covalently to form a stable double-stranded polynucleotide; triple-stranded hybridization is also theoretically possible. The resulting (usually) double-stranded polynucleotide is a “hybrid.” The proportion of the population of polynucleotides that forms stable hybrids is referred to herein as the “degree of hybridization.”

[0059] Hybridization conditions will typically include salt concentrations of less than about 1M, more usually less than about 500 mM and preferably less than about 200 mM. Hybridization temperatures can be as low as 5 degree C., but are typically greater than 22 degree C., more typically greater than about 30 degree C., and preferably in excess of about 37 degree C. Longer fragments may require higher hybridization temperatures for specific hybridization. As other factors may affect the stringency of hybridization, including base composition and length of the complementary strands, presence of organic solvents and extent of base mismatching, the combination of parameters is more important than the absolute measure of any one alone.

[0060] Hybridization probes are oligonucleotides capable of binding in a base-specific manner to a complementary strand of nucleic acid. Such probes include peptide nucleic acids, as described in Nielsen et al., Science 254, 1497-1500 (1991), and other nucleic acid analogs and nucleic acid mimetics. See U.S. Pat. No. 6,156,501 filed Apr. 3, 1996. Hybridizing specifically to refers to the binding, duplexing, or hybridizing of a molecule substantially to or only to a particular nucleotide sequence or sequences under stringent conditions when that sequence is present in a complex mixture (e.g., total cellular) DNA or RNA.

[0061] Isolated nucleic acid is an object species invention that is the predominant species present (i.e., on a molar basis it is more abundant than any other individual species in the composition). Preferably, an isolated nucleic acid comprises at least about 50, 80 or 90% (on a molar basis) of all macromolecular species present. Most preferably, the object species is purified to essential homogeneity (contaminant species cannot be detected in the composition by conventional detection methods).

[0062] Mixed population or complex population refers to any sample containing both desired and undesired nucleic acids. As a non-limiting example, a complex population of nucleic acids may be total genomic DNA, total genomic RNA or a combination thereof. Moreover, a complex population of nucleic acids may have been enriched for a given population, but include other undesirable populations. For example, a complex population of nucleic acids may be a sample which has been enriched for desired messenger RNA (mRNA) sequences but still includes some undesired ribosomal RNA sequences (rRNA).

[0063] mRNA or mRNA transcripts as used herein, include, but not limited to pre-mRNA transcript(s), transcript processing intermediates, mature mRNA(s) ready for translation and transcripts of the gene or genes, or nucleic acids derived from the mRNA transcript(s). Transcript processing may include splicing, editing and degradation. As used herein, a nucleic acid derived from an mRNA transcript refers to a nucleic acid for whose synthesis the mRNA transcript or a subsequence thereof has ultimately served as a template. Thus, a cDNA reverse transcribed from an mRNA, an RNA transcribed from that cDNA, a DNA amplified from the cDNA, an RNA transcribed from the amplified DNA, etc., are all derived from the mRNA transcript and detection of such derived products is indicative of the presence and/or abundance of the original transcript in a sample. Thus, mRNA derived samples include, but are not limited to, mRNA transcripts of the gene or genes, cDNA reverse transcribed from the mRNA, cRNA transcribed from the cDNA, DNA amplified from the genes, RNA transcribed from amplified DNA, and the like.

[0064] Nucleic acid library is an intentionally created collection of nucleic acids which can be prepared either synthetically or biosynthetically and screened for biological activity in a variety of different formats (e.g., libraries of soluble molecules; and libraries of oligos tethered to resin beads, silica chips, or other solid supports). Additionally, the term “array” is meant to include those libraries of nucleic acids which can be prepared by spotting nucleic acids of essentially any length (e.g., from 1 to about 1000 nucleotide monomers in length) onto a substrate. The term “nucleic acid” as used herein refers to a polymeric form of nucleotides of any length, either ribonucleotides, deoxyribonucleotides or peptide nucleic acids (PNAs), that comprise purine and pyrimidine bases, or other natural, chemically or biochemically modified, non-natural, or derivatized nucleotide bases. The backbone of the polynucleotide can comprise sugars and phosphate groups, as may typically be found in RNA or DNA, or modified or substituted sugar or phosphate groups. A polynucleotide may comprise modified nucleotides, such as methylated nucleotides and nucleotide analogs. The sequence of nucleotides may be interrupted by non- nucleotide components. Thus the terms nucleoside, nucleotide, deoxynucleoside and deoxynucleotide generally include analogs such as those described herein. These analogs are those molecules having some structural features in common with a naturally occurring nucleoside or nucleotide such that when incorporated into a nucleic acid or oligonucleoside sequence, they allow hybridization with a naturally occurring nucleic acid sequence in solution. Typically, these analogs are derived from naturally occurring nucleosides and nucleotides by replacing and/or modifying the base, the ribose or the phosphodiester moiety. The changes can be tailor made to stabilize or destabilize hybrid formation or enhance the specificity of hybridization with a complementary nucleic acid sequence as desired.

[0065] Nucleic acids according to the present invention may include any polymer or oligomer of pyrimidine and purine bases, preferably cytosine, thymine, and uracil, and adenine and guanine, respectively. See Albert L. Lehninger, PRINCIPLES OF BIOCHEMISTRY, at 793-800 (Worth Pub. 1982). Indeed, the present invention contemplates any deoxyribonucleotide, ribonucleotide or peptide nucleic acid component, and any chemical variants thereof, such as methylated, hydroxymethylated or glucosylated forms of these bases, and the like. The polymers or oligomers may be heterogeneous or homogeneous in composition, and may be isolated from naturally-occurring sources or may be artificially or synthetically produced. In addition, the nucleic acids may be DNA or RNA, or a mixture thereof, and may exist permanently or transitionally in single-stranded or double-stranded form, including homoduplex, heteroduplex, and hybrid states.

[0066] An oligonucleotide or polynucleotide is a nucleic acid ranging from at least 2, preferable at least 8, and more preferably at least 20 nucleotides in length or a compound that specifically hybridizes to a polynucleotide. Polynucleotides of the present invention include sequences of deoxyribonucleic acid (DNA) or ribonucleic acid (RNA) which may be isolated from natural sources, recombinantly produced or artificially synthesized and mimetics thereof. A further example of a polynucleotide of the present invention may be peptide nucleic acid (PNA). The invention also encompasses situations in which there is a nontraditional base pairing such as Hoogsteen base pairing which has been identified in certain tRNA molecules and postulated to exist in a triple helix. “Polynucleotide” and “oligonucleotide” are used interchangeably in this application.

[0067] A probe is a surface-immobilized molecule that can be recognized by a particular target. Examples of probes that can be investigated by this invention include, but are not restricted to, agonists and antagonists for cell membrane receptors, toxins and venoms, viral epitopes, hormones (e.g., opioid peptides, steroids, etc.), hormone receptors, peptides, enzymes, enzyme substrates, cofactors, drugs, lectins, sugars, oligonucleotides, nucleic acids, oligosaccharides, proteins, and monoclonal antibodies.

[0068] Solid support, support, and substrate are used interchangeably and refer to a material or group of materials having a rigid or semi-rigid surface or surfaces. In many embodiments, at least one surface of the solid support will be substantially flat, although in some embodiments it may be desirable to physically separate synthesis regions for different compounds with, for example, wells, raised regions, pins, etched trenches, or the like. According to other embodiments, the solid support(s) will take the form of beads, resins, gels, microspheres, or other geometric configurations.

[0069] A target is a molecule that has an affinity for a given probe. Targets may be naturally-occurring or man-made molecules. Also, they can be employed in their unaltered state or as aggregates with other species. Targets may be attached, covalently or noncovalently, to a binding member, either directly or via a specific binding substance. Examples of targets which can be employed by this invention include, but are not restricted to, antibodies, cell membrane receptors, monoclonal antibodies and antisera reactive with specific antigenic determinants (such as on viruses, cells or other materials), drugs, oligonucleotides, nucleic acids, peptides, cofactors, lectins, sugars, polysaccharides, cells, cellular membranes, and organelles. Targets are sometimes referred to in the art as anti-probes. As the term targets is used herein, no difference in meaning is intended. A “Probe Target Pair” is formed when two macromolecules have combined through molecular recognition to form a complex.

[0070] Kurtosis in statistics is the degree of flatness or ‘peakedness’ in the region of mode of a frequency curve. It is measured relative to the ‘peakedness’ of the normal curve. It tells us the extent to which a distribution is more peaked or flat-topped than the normal curve. If the curve is more peaked than a normal curve it is called ‘Lepto Kurtic.’ In this case items are more clustered about the mode. If the curve is more flat-toped than the more normal curve, it is Platy-Kurtic. The normal curve itself is known as “Meso Kurtic.” Kurtosis is a measure of how “fat” a probability distribution's tails are, measured relative to a normal distribution having the same standard deviation.

[0071] Metastasis refers to the spread of cancer from its original site to other areas in the body. Cancer cells have the ability to invade the blood vessels and find their way into the bloodstream or lymph system. Once in the blood, cancer cells can go to virtually any part of the body and make a home for themselves. Each cancer has a particular way of spreading. The following formula can be used to calculate kurtosis:

$$kurtosis = \frac{\sum {( x - μ )}^{4}}{N {σ}^{4}} - 3$$

where s is the standard deviation. The kurtosis of a normal distribution is 0.

### C. Identification of Colorectal Cancer Metastases Expression Pattern and Candidate Genes

[0072] Colorectal cancer is the second leading cause of cancer-related death in the United States. Early detection of colon cancer in its premalignant stages prevents progression to invasive cancer. Available screening modalities include chemical testing for the presence of occult blood in the stool, endoscopic visualization of the lower portion of the colon by sigmoidoscopy or full endoscopic visualization by colonoscopy; the sensitivity for detecting cancer is 15-30%, 60% and 90%, respectively. Early detection and treatment is critical to a favorable treatment outcome. See Biology and Treatment of Colorectal Cancer Metastasis (1986) A. M. Mastormarino ed., Martinus Nijhoff, and Molecular Genetics and Colorectal Neoplasia: A Primer for the Clinician (1996) Church et al. eds. Igaku-Shoin Medical Pub., which are each incorporated herein by reference.

[0073] Colorectal cancer stages may be classified according to the Dukes' system, which reflects how deeply the cancer has invaded the lining or wall of the bowel, and whether it has spread to the lymph nodes or more distant sites. See Table 1. The Dukes' stages are as follows: Dukes' A, B, C and D. Dukes' A is characterized by superficial invasion into the mucosa, the innermost muscular layer of the bowel wall (i.e., nearest the stool). Those with cancers detected at Dukes' A stage have a greater than 90% five-year survival rate. Dukes' B, which can be further divided into B1 and B2, is characterized by penetration of the cancer into or through the muscular layer of the bowel wall but not into the regional lymph nodes. Dukes' C, which can be further divided into C1 and C2, is characterized by spread of the cancer to regional lymph nodes. Dukes' D is characterized by metastasis of the cancer to distant organs such as the liver. The five-year survival rate for individuals with Dukes' D is less than 1%. The risk of recurrence of the cancer or metastasis to other parts of the body increases from Dukes' A to Dukes' C stages.

TABLE 1
Dukes' Classification of Colon Cancer

| | EXTENT OF | LYMPH NODE | |
|---|---|---|---|
| CLASS | INVASION | INVOLVEMENT | PROGNOSIS |
| Dukes' A | Limited to the | None | 5 year survival > 90% |
| | mucosa | | |
| Dukes' B1 | into muscularis | None | 5 year survival 70-85% |
| | propria | | |
| Dukes' B2 | through | None | 5 year survival 55-65% |
| | muscularis | | |
| | propria | | |
| Dukes' C1 | into muscularis | Yes | 5 year survival 45-55% |
| | propria | | |
| Dukes' C2 | through | Yes | 5 year survival 20-30% |
| | muscularis | | |
| | propria | | |
| Dukes' D | distant | NA | 5 year survival < 1% |
| | metastases | | |

[0074] Surgical resection is highly effective for early stage colon cancers, providing cure rates of over 90% in Dukes' A and 75% in Dukes' B. The presence of nodal involvement (Dukes' C) predicts a 60% likelihood of recurrence. An important factor in colorectal cancer prognosis is the presence or absence of regional lymph node metastasis. In one embodiment mRNA expression profiles associated with the presence or absence of nodal involvement are disclosed. In some embodiments molecular profiling of primary tumors may be used to distinguish lymph node negative and positive stages of colorectal cancers. In one embodiment a molecular signature of lymph node metastasis is disclosed. In some embodiments a molecular signature is used, for example, to determine disease stage (e.g. presence or absence of lymph node metastasis), predict treatment outcome, select treatment options (e.g. radiation and chemotherapy), identify new therapeutic targets or identify compounds that promote or inhibit metastasis or disease progression.

[0075] Methods are disclosed for predicting phenotypic classes of colorectal tumors. Methods are also disclosed for the identification of compounds that modulate the transition between a Dukes' B and Dukes' C tumor or compounds that may modulate metastasis of a colorectal tumor into the lymph nodes, based on gene expression profiles. In one aspect, the method involves identifying a colorectal tumor by obtaining a nucleic acid sample derived from colorectal tissue and determining a gene expression profile from a gene expression product of at least one informative gene having altered expression in a Dukes' B type tumor compared to a Dukes' C type tumor. In a preferred embodiment the expression of a plurality of genes is analyzed and compared to the expression of the same genes in reference samples. For some informative genes expression is decreased in Dukes' C tumors relative to Dukes' B tumors and decreased expression in the unknown sample compared to expression levels in Dukes' B tumors is indicative of a Dukes' C tumor. For some informative genes expression is increased in Dukes' C tumors relative to Dukes' B tumors and increased expression in the unknown sample compared to expression levels in Dukes' B tumors is indicative of a Dukes' C tumor.

[0076] Comparison of gene expression patterns from Dukes' B and Dukes' C samples resulted in the identification of genes that are differentially regulated between the two tumor stages. The genes are listed in Tables 2 and 3. Dukes' C tumors are characterized by nodal involvement indicating metastasis to the lymph nodes. Dukes' B tumors are characterized by penetration of the tumor into the wall of the bowel but not into the surrounding lymph nodes. Different treatment regimens are indicated by the stage of the tumor. Treatments available include, but are not limited to, surgical resection, chemotherapy and radiation treatment. The genes that are differentially regulated in Dukes' C versus Dukes' B tumors may be used as a predictive signature of metastases or of regional lymph node involvement.

[0077] Differential gene expression has been used to differentiate benign colorectal tumors from malignant tumors (Notterman et al., (2001). Cancer Res 61(7):3124-30), to distinguish colon carcinomas from normal samples (Zou, T. T. and Meltzer, S. J. (2002) Oncogene 21931):4855-62), to identify genes that are differentially expressed in highly metastatic cell lines (Hegde, P. and Quakenbush, J. (2001) Cancer Res 61:7792-7797), and to identify genes whose expression was different between adenomas and carcinomas (Lin, Y. M. and Nakamura, Y. (2002) Oncogene 21(26):4120-8), each of which is incorporated herein by reference.

[0078] In one embodiment one or more of the genes identified in Tables 2-3 may be used to characterize a sample as either having the presence or absence of regional lymph node metastases. The expression level of one or more of the genes listed in Tables 2-3 is determined by any method known in the art and the expression level is compared to the expression level of the same one or more genes from a second source that is known or predicted to be free of regional lymph node metastases. The second source may be, for example, a tissue sample that has been classified to be free of regional lymph node metastases, such as a Dukes' B tumor sample, or an average expression value from two or more samples that are believed to be free of regional lymph node metastases. The direction and magnitude of the relative change in the expression value in the unknown sample compared to the reference sample may then be compared to a database of expression changes between samples that have regional lymph node metastases present and samples where regional lymph node metastases is absent. If a gene is up regulated in an unknown sample when compared to a non metastasized sample and that gene is up regulated in a metastasized sample, such as Dukes' C, compared to a non metastasized sample, such as a Dukes B' sample, for example, as shown in Tables 2-3, then the sample is classified as having regional lymph node metastases present. For example, if gene A is up regulated in the unknown sample relative to the average expression of gene A in a plurality of Dukes' B samples and gene A is up regulated in Dukes' C samples relative to Dukes' B samples then the unknown sample is classified as being Dukes' C and having regional lymph node metastases present. In a preferred embodiment a collection of genes is evaluated so that classifications may be made with high confidence. In a more preferred embodiment at the expression level of at least 20 genes from Tables 2 and 3 are compared to a reference.

[0079] In some embodiments a plurality of informative genes will be analyzed. Each informative gene may be up or down regulated in the unknown sample compared to a non-metastasized sample. The direction of change for each informative gene is compared to a database of direction of change for informative genes. The database may be generated by comparing gene expression in one or more samples where metastasis is present to one or more samples where metastasis is absent, such as the comparison of Dukes' C tumors to Dukes' B tumors in Tables 2 and 3. If the direction of change between the unknown sample and a non-metastasized sample or samples is the same as the direction of change between the metastasized and non-metastasized samples in a database then the unknown sample is predicted to have regional lymph node metastasis present. For example, Table 2 indicates that Spondin 1 (SEQ ID NO: 4) is up regulated in Dukes' C samples compared to Dukes' B samples so if expression levels of Spondin 1 are determined in an unknown sample and found to be up regulated in comparison to the expression of Spondin 1 in one or more Dukes' B samples, or the average expression level of Spondin 1 in a plurality of Dukes' B samples, then the unknown sample is predicted to have metastasized. If many genes from the set of informative genes are analyzed the probability that the prediction is correct increases. Class prediction with the 81 genes disclosed in Tables 2 and 3 (SEQ ID NOs: 1-81) resulted in classification with greater than 90% accuracy. Each of the 81 genes identified is represented in Tables 2 and 3. The sequence of the gene may be obtained by the GenBank accession number and the sequences of the probes used to detect the gene may be obtained from the Affymetrix NetAffx.com website.

[0080] In some embodiments a collection of genes that are differentially expressed between Dukes' B and Dukes' C stages is disclosed. A collection of 81 genes were identified and are disclosed in Tables 2 and 3, SEQ ID NOs: 1-81. The collection may comprise each of the 81 genes or a subset of the 81 genes. A training data set may be provided that includes expression level values for each of the genes in the collection in a plurality of reference samples of known Dukes' stage or known to have presence or absence of lymph node metastasis. Expression values may be obtained by any method known in the art. The training data set may include the average expression value for a given gene in a plurality of different reference samples that are of similar phenotypic class (e.g. the average expression value for H2BFH in a plurality of samples that are each Dukes' stage B). Individual genes in the unknown sample are compared to the corresponding gene in the reference sample or samples, for example, the expression of H2BFH in the unknown sample is compared to the expression of H2BFH in the reference sample or samples.

[0081] In one embodiment an array of nucleic acid probes is designed to interrogate one or more genes from Tables 2 and 3. There are 81 unique genes represented in the tables. In a preferred embodiment an array is designed to interrogate each of the 81 genes or a subset of the 81 genes. In a preferred embodiment the array may contain a limited number of probes designed to analyze only a specific set of genes that are part of a gene expression profile, for example in one embodiment an array is disclosed that has a probe set for each of the genes in Tables 2 and 3 and control probes. Control probes that may be used include the controls currently described in the Affymetrix, GeneChip® Expression Analysis Technical Manual in Chapter 2, Section 2, for example, Control Oligo B2, biotinylated hybridization controls: bioB, bioC, bioD and cre, and the Poly-A spike controls: dap, thr, trp, phe and lys. The arrays may be used to identify changes in gene expression pattern in the target genes between two samples or to obtain an expression pattern from an experimental sample. The expression pattern may be compared to expression patterns of known reference samples. Samples may be differentially labeled and hybridized to the same copy of an array. Alternatively, samples may be hybridized to different copies of an array.

[0082] The methods may be used as a predictor of likelihood of the presence or absence of regional lymph node metastases. The methods may be combined with other methods of classification, such as histological methods, to provide a determination of the presence or absence of regional lymph node metastases or to increase the confidence level of a classification based on a second method.

[0083] In one embodiment the genes identified may be used individually or in groups of 2 or more, 3 or more, 4 or more, 5 or more, 6 or more, 10 or more or 20 or more to determine the efficacy of a drug or treatment regimen. In preferred embodiments each of the 81 genes is analyzed. For example, tumor cells from a Dukes' C tumor may be treated with a drug and the expression level of one or more informative genes may be determined before and after treatment to determine the direction of change in expression. If the direction of change is the same as the direction of change from Dukes' C to Dukes' B tumors then the drug is a possible inhibitor of metastasis.

[0084] In another embodiment the genes may be used individually or in groups of 2 or more, 3 or more, 4 or more, 5 or more, 6 or more, 10 or more or 20 or more to identify compounds or environmental stimuli that may increase or decrease the likelihood of metastasis. For example, tumor cells from a Dukes' B tumor may be treated with a compound and the expression level of one or more informative genes from Tables 2-3 may be determined before and after treatment to determine the direction of change. If the direction of change is the same as the direction of change between Dukes' B and Dukes' C tumors then the compound increases the likelihood of metastasis. If the direction of change is different or the opposite of the direction of change between Dukes' B and Dukes' C tumors, for example if a gene is up regulated in Dukes' C compared to Dukes' B and treatment with the compound down regulates the expression of the gene, then the compound may be an inhibitor of metastasis.

[0085] Chemotherapy and radiation normally result in adverse side effects. These treatments have been shown to reduce the risk of recurrence and to increase cure rate but not everyone who has the treatment will benefit and some patients may benefit from one treatment but not the other. Currently there is no way of telling in advance who will or will not be helped by a given treatment. In some embodiments the gene expression patterns disclosed may be used to predict efficacy of a given treatment or to predict treatment outcome. Patients who will respond to a particular treatment may be identified using gene expression pattern.

[0086] Hierarchical clustering analysis was applied to assess the distinction between Dukes' B and Dukes' C samples based on their expression profiles. In two-dimensional analyses, gene expression patterns that are similar, group together, i.e., cluster. Consequently, one expects that tissues with markedly different expression patterns would form distinct clusters when sorted by expression pattern. Results of this analysis show good segregation of Dukes' B and Dukes' C tissues based on the differing levels of the candidate genes. Clustering with the genes gave clear separation between Dukes' B and Dukes' C type tumors. In some embodiments any 2 or more of these genes may be used as a predictive signature of metastasis.

[0087] Tables 2 and 3 disclose a collection of genes that were identified as being differentially expressed in Dukes' B and Dukes' C samples. Some genes were identified as being up regulated in the Dukes' C samples compared to the Dukes' B samples and other genes were identified as being down regulated in the Dukes' C samples compared to the Dukes' B samples. Direction and magnitude of change is indicated in column 8, for example H2BFH is up-regulated in C relative to B by 1.5 fold and FUT4 is down regulated in C relative to B by 1.5 fold. Column 1 indicates the SEQ ID NO of the gene, there are 20 genes that are present in both Table 2 and Table 3 for a total of 81 genes. Column 2 is a numerical identifier of the probe set for the gene on the Affymetrix HU133 probe array (Affymetrix, Inc., Santa Clara, Calif.) the sequences of the probes in the corresponding probe set and the target sequence used to generate the probes can be accessed on the web at netaffx.com. Column 3 lists the GenBank accession number (using the accession number the entire gene and surrounding sequence may be accessed on the world wide web at ncbi.nlm.nih.gov/Entrez/index.html). Column 4 includes a description of the gene. Column 5 provides the gene symbol if known. Column 6 provides the chromosomal location of the gene. Column 6 provides the Mann-Whitney U test P-value, Column 7 indicates the fold change of the expression of the gene in Dukes' C relative to B. The direction of change is indicated in Column 8, for example, H2BFH is up regulated in Dukes' C relative to B by 1.6 fold, meaning that the expression of H2BFH in the Dukes' C samples is 1.6X the expression of H2BFH in the Dukes' B samples and the expression of FUT4 is down regulated in Dukes' C relative to B by 1.5 fold, indicating that the expression of FUT4 in the Dukes' B samples is 1.5X the expression of FUT4 in the Dukes' C samples. Column 9 indicates if the gene was up or down regulated in Dukes' C relative to Dukes' B. Column 10 indicates the functional category of the gene if known.

[0088] In one embodiment gene expression profiles are used to distinguish different Dukes' stages of colon tumors. In another embodiment gene expression profiles are used to determine if a tumor has metastasized to the local lymph nodes. In one embodiment samples are hybridized to an array to detect differential gene expression. In another embodiment quantitative RT-PCR is used to detect gene expression differences or to confirm gene expression differences observed by another method. In one embodiment hierarchical clustering using genes differentially expressed between different Dukes' stages of tumors, for example Dukes' B versus Dukes' C, is used to segregate tissue types. Hierarchical clustering of genes may be used to increase confidence in genes that are candidates for a molecular signature of a particular disease state. In another embodiment candidate genes that have been identified are validated using a larger patient cohort. In another embodiment the differentially expressed genes disclosed are used to develop new or improved diagnostics methods and new treatment regimens. In another embodiment one or more of the genes in Tables 2 or 3 are used as candidates for drugs to regulate, inhibit or prevent transition from Dukes' B stage to Dukes' C stage. In another embodiment one or more of the genes in Tables 2 or 3 are candidates for genes that play a role in metastasis.

[0089] The above disclosure generally describes the present invention. A more complete understanding can be obtained by reference to the following specific examples which are provided herein for purposes of illustration only, and are not intended to limit the scope of the invention.

### EXAMPLE

[0090] Molecular profiling was carried out by using 20 samples collected from colon cancer patient-donors without known local lymph node metastases (Dukes' Stage B) and 15 samples from patient-donors with local lymph node metastases (Dukes' Stage C). The maximum age of the patients with Dukes' B was 96 years, minimum 46 years, average 74 years STD=12.5 years. The maximum age of the patients with Dukes' C was 86 years, minimum 36 years, average 67.6 years STD=14 years. Labeled target cRNAs were hybridized to high density oligonucleotide arrays containing sequences of approximately 22,000 genes. The reproducibility of the GeneChip®Probe Array-based platform was tested first by conducting independent sample preparation and hybridizations of one Dukes' C and two Dukes' B samples in triplicate. Reproducibility was evaluated by using various parameters, such as %CV and R squared values. For sample prep methods, hybridization methods and data analysis methods see Affymetrix Gene Expression Technical Manual, 2002, available at Affymetrix.com.

[0091] Differentially expressed genes between Dukes' B and Dukes' C patients were identified by the non-parametric, Mann-Whitney U test, the parametric Student t-test and by SAM (Significance Analysis of Microarray, see Tusher et al, (2001) Proc. Natl. Acad. Sci., 98:5116, which is incorporated herein by reference in its entirety) with p ≦0.005 or with p ≦0.01 and a minimum 1.5 fold change between groups. 50 candidate probe sets were identified with P ≦0.005 (Table 3) and 54 probe sets were identified with P ≦0.01 and ≧1.5 fold change (Table 2). After hierarchical clustering, the candidate probe sets accurately segregated Dukes' B from Dukes' C patients. Probe sets were annotated with locus and functional category information. There were 20 probe sets that were detected by both criteria and are present in both Table 2 and Table 3. SEQ ID NOs: 102 to 321 are the probes in the 20 common probe sets, and SEQ ID NOs: 82-101 are the target sequence used to select probes for these probe sets. The probe sets are as follows: 214238_AT (SEQ ID NOs: 102-112), 215534_AT (SEQ ID NOs: 113-123), 220583_AT (SEQ ID NOs: 124-134), 207451_AT (SEQ ID NOs: 135-145), 202320_AT (SEQ ID NOs: 146-156),215019_x_AT (SEQ ID NOs: 157-167),211265_AT (SEQ ID NOs: 168-178), 209791_AT (SEQ ID NOs: 179-189), 219103_AT (SEQ ID NOs: 190-200), 201053_S_AT (SEQ ID NOs: 201-211), 220144_S_AT (SEQ ID NOs: 212-222), 212650_AT (SEQ ID NOs: 223-233), 200906_S_AT (SEQ ID NOs: 234-244), 203311_S_AT (SEQ ID NOs: 245-255), 205450_AT (SEQ ID NOs: 256-266), 208546_X_AT (SEQ ID NOs: 267-277), 208920_AT (SEQ ID NOs: 278-288), 210536_S_AT (SEQ ID NOs: 289-299), 210551_S_AT (SEQ ID NOs: 300-310), and 212253_X_AT (SEQ ID NOs: 311-321). For example, probe set “214238_at” measures expression of the DT1P1B gene (SEQ ID NO: 52), the probe set includes the eleven perfect match probes SEQ ID NO: 102 to 112. The probe set also includes mismatch probes that vary from the perfect match probe at the central position, position 13 in a 25 nucleotide probe. When 3′ amplification methods are used probes are typically selected from the terminal 600 bases of the mRNA. When antisense cRNA will be hybridized to the array, the probes are complementary to the antisense cRNA and are therefore the same orientation and sequence as the sense MRNA.

[0092] The chromosomal distribution of 48 of the identified genes differentially expressed in Duke B vs. Duke C patients, detected by both Mann-Whitney U test and Student T test as well as SAM with P<=0.005 and False Detection Rate (FDR)=0, is as follows. For down regulated genes (chromosome/number of genes identified): 1/3, 2/1, 3/0, 4/0, 5/1, 6/0, 7/2, 8/0, 9/0, 10/1, 11/1, 12/1, 13/0, 14/0, 15/0, 16/0, 17/1, 18/0, 19/1, 20/4, 21/1, 22/1, X/1, and Y/1. For up regulated genes 1/3, 2/2, 3/0, 4/1, 5/1, 6/1, 7/2, 8/1, 9/0, 10/0, 11/2, 12/2, 13/0, 14/6, 15/1, 16/1, 17/1, 18/0, 19/2, 20/0, 21/0, 22/0, X/1, and Y/0. More than 20% of the candidates overexpressed by Dukes' C are located on Chromosome 14, while about 20% of the candidates underexpressed by Dukes' C. are located on Chromosome 20, which indicates possible hyper or hypomethylation on selected chromosomes.

[0093] Many candidate genes were found to involve important pathways. Candidate gene RAS is involved in metastasis. FZ (frizzled) and DSH (disheveled), members of the Wnt signaling pathway, were inversely correlated in their expression.

[0094] Quantitative-RT- PCR (QRT-PCR) of selected candidate genes confirmed the microarray results for all candidates tested. QRT-PCR may be done by removing DNA from total RNA by on-column DNase digestion (Qiagen). Primers and probe selection may be done using PrimerExpress (ABI). Reagents for RT and PCR may be obtained from ABI. Q-RT-PCR may be done using Taqman and an ABI 7700. SequenceDetector Analysis Software 1.7 is available from ABI. QRT-PCR validation of microarray results was performed for 10 of the candidate genes. Dukes' C/Dukes' B fold change were compared by QRT-PCR and microarray data for 10 candidate genes with P<=0.01 and fold change >=1.5 in microarray detection. The 5 up-regulated genes analyzed were synaptogyrin 3 (SYNGR 3), growth factor receptor-bound protein 14(GRB14), RAS-related protein 7 (RAB7), spondin1(SPON1), dishevelled 2 (DVL2). The 5 down-regulated genes analyzed were translation initiation factor 1A (EIF1A), proliferating cell nuclear antigen (PCNA), proteasome inhibitor subunit 1 (PSMF1), frizzled homolog 3 (FZD3) and apoptosis-related cysteine protease (CASP5). EIF1A, SPON1 and PCNA have been previously identified. RAB7 is known to be involved in the metastasis pathway and DVL2 and FZD3 are known to be involved in the Wnt signaling pathway.

[0095] cDNA Synthesis was done using SuperScript Choice (Invitrogen) system with primer: T7-dT with sequence comprising a promoter for T7 RNA polymerase in the 5′ region and (dT)24 at the 3′ end. In Vitro Transcription was done using BioArray High Yield RNA Transcript labeling kit (Enzo). GeneChip® Arrays Human Genome U133A Array (Affymetrix) containing probe sets representing ˜22000 genes were used for hybridization. For Data Analysis the Microarray Suite 5.0 using default parameter settings (Affymetrix), Data Mining Tool (Affymetrix), MS Excel and Access, GeneMaths (Applied Maths) was used. See also, Mahadevappa and Warrington, (1999), Nature Biotech. 17:1134 which is incorporated herein by reference in its entirety. In preferred embodiments sample preparation and array analysis are performed according to the methods described in the GeneChip® Expression Analysis Technical Manual, rev 3 (2003, 2004) available from Affymetrix, Inc., Santa Clara, which is incorporated herein by reference in its entirety for all purposes.

[0096] Mann-Whitney U test may be carried out on raw data after removing probe sets called absent in all samples in the study and selecting candidate genes with a selected P value. RNA integrity of the samples may be evaluated using GAPDH ratio and percent present calls.

[0097] The example shows that gene expression profiling can accurately segregate invasive colon cancers with and without lymph node metastases. Hierarchical clustering as well as 3D PCA of 50 probe sets commonly detected by U test and T test with P<=0.005 (Table 3) or 54 probe sets with P<=0.01 and average fold Dukes' C versus Dukes' B >=1.5 (Table 2) separate all the samples in Dukes' B from Dukes' C with a high degree of accuracy. Q-RTPCR results from 10 candidate genes were consistent with the observed microarray results. Class prediction with 81 unique probe sets (50+54) may be used to classify Duke's B and Duke's C with a high level of accuracy, greater than 90% accuracy, through 10 fold cross validation. Three of the candidate genes, EIF1A, SPON1 and PCNA, had been previously identified in other studies, confirming the accuracy of the results.

### CONCLUSION

[0098] It is to be understood that the above description is intended to be illustrative and not restrictive. Many variations of the invention will be apparent to those of skill in the art upon reviewing the above description. The scope of the invention should be determined with reference to the appended claims, along with the full scope of equivalents to which such claims are entitled. All cited references, including patent and non-patent literature, are incorporated herewith by reference in their entireties for all purposes.

TABLE 2
Genes differentially expressed in Dukes' C relative to Dukes B with P <= 0.01 and fold change >=1.5

| | | | | | | | | Change | |
|---|---|---|---|---|---|---|---|---|---|
| SEQ ID | Probeset | | | | Chromosome | | Fold | Direction | Functional |
| NO | Name | Accession | Description | Symbol | Loci | P-Value | Change | C to B | Category |
| 1 | 208527_x_at | NM_003523 | H2B histone | H2BFH | 6p21.3 | 0.0057 | 1.6 | up | chromosome |
| | | | family | | | | | | |
| 2 | 208546_x_at | NM_003524 | H2B histone | H2BFJ | 6p21.3 | 0.00459 | 2.1 | up | chromosome |
| | | | family, member J | | | | | | |
| | | | (H2BFJ) | | | | | | |
| 3 | 221115_s_at | NM_018655 | lens epithelial | LENEP | 1q22 | 0.00783 | 1.6 | up | developmental |
| | | | protein | | | | | | |
| 4 | 213994_s_at | AI885290 | spondin 1, (f- | SPON1 | 11p14-p15.2 | 0.00459 | 2.1 | up | extracellular |
| | | | spondin) | | | | | | |
| | | | extracellular | | | | | | |
| | | | matrix protein | | | | | | |
| 5 | 209892_at | AF305083 | alpha(1,3)- | FUT4 | 11q21 | 0.00634 | 1.5 | down | metablism |
| | | | fucosyltransferase | | | | | | |
| | | | IV (FUTIV) | | | | | | |
| 6 | 204476_s_at | NM_022172 | pyruvate | PC | 11q13.4-q13.5 | 0.00868 | 1.6 | up | metabolism |
| | | | carboxylase (PC) | | | | | | |
| 7 | 211407_at | M33374 | cell adhesion | NDUFB7 | 19p13.12-p13.11 | 0.00705 | 1.9 | down | metabolism |
| | | | protein (SQM1) | | | | | | |
| 8 | 209791_at | AL049569 | PDI (protein- | PADI2 | 1p35.2-p35.1 | 0.001 | 1.9 | up | metabolism |
| | | | arginine | | | | | | |
| | | | deiminase | | | | | | |
| 9 | 210536_s_at | S67798 | PH-20 (SPAM1) | SPAM1 | 7q31 | 0.00459 | 1.8 | up | metabolism |
| 10 | 205450_at | NM_002637 | phosphorylase | PHKA1 | Xq12-q13 | 0.00233 | 1.5 | up | metabolism |
| | | | kinase, alpha 1 | | | | | | |
| | | | (muscle) (PHKA1) | | | | | | |
| 11 | 207451_at | NM_014360 | phosphorylase | NKX2H | 14q13.1 | 0.00207 | 1.7 | up | oncogenesis |
| | | | kinase, alpha 1 | | | | | | |
| | | | (muscle) (PHKA1) | | | | | | |
| 12 | 217268_at | AK024417 | RAS-RELATED | RAB7 | 3q22.1 | 0.00961 | 2.1 | up | oncogenesis |
| | | | PROTEIN RAB-7 | | | | | | |
| 13 | 210551_s_at | BC001620 | acetylserotonin O- | ASMT | Xp22.3 or | 0.00207 | 2.1 | down | protein |
| | | | methyltransferase | | Yp11.3 | | | | synthesis |
| 14 | 207500_at | NM_004347 | apoptosis-related | CASP5 | 11q22.2-q22.3 | 0.0057 | 1.9 | down | proteolysis |
| | | | cysteine protease | | | | | | |
| | | | (CASP5) | | | | | | |
| 15 | 201053_s_at | NM_006814 | proteasome | PSMF1 | 20p12.2-p13 | 0.00114 | 1.6 | down | proteolysis |
| | | | (prosome, | | | | | | |
| | | | macropain) | | | | | | |
| | | | inhibitor subunit 1 | | | | | | |
| | | | (PI31) (PSMF1) | | | | | | |
| 16 | 216981_x_at | X60502 | leukosialin cDNA- | SPN | 16p11.2 | 0.00868 | 1.5 | up | receptor/signal |
| | | | II | | | | | | transduction |
| 17 | 211265_at | U13216 | protaglandin | PTGER3 | 1p31.2 | 0.00368 | 1.7 | down | receptor/signal |
| | | | receptor EP3A1 | | | | | | transduction |
| 18 | 216247_at | AF113008 | ribosomal protein | FLB0708 | 8 | 0.00634 | 1.6 | down | ribosomal |
| | | | S20 | | | | | | |
| 19 | 216553_x_at | AL121890 | 40S ribosomal | RPS21 | 20 | 0.00512 | 1.9 | down | ribosomal |
| | | | protein S21 | | | | | | |
| 20 | 204874_x_at | NM_003933 | BAI1-associated | BAIAP3 | 16p13.3 | 0.00459 | 2.0 | up | signal |
| | | | protein 3 | | | | | | transduction |
| | | | (BAIAP3) | | | | | | |
| 21 | 214067_at | AL031709 | C2 domain | KIAA0734 | 16p13.3 | 0.0057 | 1.6 | down | signal |
| | | | protein KIAA0734 | | | | | | transduction |
| 22 | 218759_at | NM_004422 | dishevelled 2 | DVL2 | 17p13.2 | 0.00705 | 1.8 | up | signal |
| | | | (homologous to | | | | | | transduction |
| | | | Drosophila dsh) | | | | | | |
| | | | (DVL2) | | | | | | |
| 23 | 206204_at | NM_004490 | growth factor | GRB14 | 2q22-q24 | 0.0057 | 2.6 | up | signal |
| | | | receptor-bound | | | | | | transduction |
| | | | protein 14 | | | | | | |
| | | | (GRB14) | | | | | | |
| 24 | 219683_at | NM_017412 | frizzled | FZD3 | 8p21 | 0.00783 | 1.8 | down | signal |
| | | | (Drosophila) | | | | | | transduction |
| | | | homolog 3 (FZD3) | | | | | | |
| 25 | 215053_at | AK023808 | transcriptional | SRCAP | 16p11.1 | 0.00961 | 1.5 | up | transcription |
| | | | activator SRCAP | | | | | | |
| | | | (SRCAP) | | | | | | |
| 26 | 202320_at | NM_001520 | general | GTF3C1 | 16p12 | 0.00294 | 1.5 | up | transcription |
| | | | transcription | | | | | | |
| | | | factor IIIC, | | | | | | |
| | | | polypeptide 1 | | | | | | |
| | | | (alpha subunit, | | | | | | |
| | | | 220 kD) | | | | | | |
| | | | (GTF3C1) | | | | | | |
| 27 | 211182_x_at | AF312387 | AML1AMP19 | RUNX1 | 21q22.3 | 0.00262 | 1.8 | up | transcription |
| | | | fusion protein | | | | | | |
| | | | (AML1AMP19 | | | | | | |
| | | | fusion) | | | | | | |
| 28 | 201018_at | AL079283 | eukaryotic | EIF1A | X | 0.00868 | 1.5 | down | transcription |
| | | | translation | | | | | | |
| | | | initiation factor 1A | | | | | | |
| 29 | 203961_at | AL157398 | nebulette protein | NEBL | 10p12 | 0.00233 | 1.6 | down | structure |
| | | | (NEBL, actin- | | | | | | |
| | | | binding Z-disc | | | | | | |
| | | | protein) | | | | | | |
| 30 | 205691_at | NM_004209 | synaptogyrin 3 | SYNGR3 | 16p13 | 0.00961 | 3.5 | up | structure |
| | | | (SYNGR3) | | | | | | |
| 31 | 203407_at | NM_002705 | periplakin (PPL) | PPL | 16p13.3 | 0.0057 | 1.5 | up | structure |
| 32 | 214870_x_at | AC002045 | nuclear pore | NPIP | 16p13-p11 | 0.00705 | 1.8 | up | structure |
| | | | complex | | | | | | |
| | | | interacting protein | | | | | | |
| 33 | 212253_x_at | BG253119 | KIAA0728 protein | BPAG1 | 6p12-p11 | 0.00329 | 1.7 | up | structure |
| 34 | 208920_at | AV752215 | sorcin | SRI | 7q21.1 | 0.00368 | 1.8 | down | structure |
| 35 | 210454_s_at | U24660 | G protein | KCNJ6 | 21q22.13-q22.2 | 0.00411 | 2.0 | down | transport |
| | | | coupled inward | | | | | | |
| | | | rectifier potassium | | | | | | |
| | | | channel 2 | | | | | | |
| | | | (hiGIRK2) | | | | | | |
| 36 | 203311_s_at | M57763 | ADP-ribosylation | ARF6 | 7q22.1 | 0.000886 | 1.5 | up | transport |
| | | | factor (hARF6) | | | | | | |
| 37 | 218224_at | NM_006029 | paraneoplastic | PNMA1 | 14q24.1 | 0.00961 | 1.6 | up | tumor related |
| | | | antigen MA1 | | | | | | |
| | | | (PNMA1) | | | | | | |
| 38 | 219103_at | NM_017707 | hypothetical | UPLC1 | 1p36.11 | 0.00368 | 1.9 | up | tumor related |
| | | | protein FLJ20199 | | | | | | |
| 39 | 211568_at | AB011122 | brain-specific | BAI3 | 6q12 | 0.00294 | 1.6 | up | tumor related |
| | | | angiogenesis | | | | | | |
| | | | inhibitor 3 | | | | | | |
| 40 | 216462_at | X79200 | SYT-SSX protein | SSX2 | Xp11.23-p11.22 | 0.00783 | 2.2 | down | tumor related |
| 41 | 220583_at | NM_025086 | hypothetical | FLJ22596 | 11q13.3 | 0.00164 | 2.0 | up | unknown |
| | | | protein FLJ22596 | | | | | | |
| 42 | 220278_at | NM_018039 | FLJ10251 | FLJ10251 | 11q21 | 0.00783 | 2.2 | up | unknown |
| 43 | 222170_at | AF098968 | familial | AF098968 | 16p13.3 | 0.00868 | 2.1 | down | unknown |
| | | | Mediterranean | | | | | | |
| | | | fever locus region | | | | | | |
| 44 | 215019_x_at | AW474158 | weakly similar to | KIAA1827 | 19q13 | 0.00294 | 2.1 | up | unknown |
| | | | ZINC FINGER | | | | | | |
| | | | PROTEIN 83 | | | | | | |
| 45 | 212358_at | AL117468 | cDNA | CLIPR-59 | 19q13.13 | 0.00411 | 1.6 | up | unknown |
| | | | DKFZp586N1922 | | | | | | |
| 46 | 220144_s_at | NM_022096 | hypothetical | ANKRD5 | 20pter-q11.23 | 0.00207 | 1.9 | down | unknown |
| | | | protein FLJ21669 | | | | | | |
| 47 | 212650_at | BF116032 | KIAA0903 protein | KIAA0903 | 2p13.3 | 0.00207 | 1.6 | up | unknown |
| 48 | 200906_s_at | AK025843 | palladin | KIAA0992 | 4q32.3 | 0.00233 | 1.5 | up | unknown |
| 49 | 221145_at | NM_018499 | PRO1097 | FLB4237 | 8q22.1 | 0.00783 | 2.1 | up | unknown |
| | | | (PRO1097) | | | | | | |
| 50 | 212444_at | AA156240 | clone HRC00953 | clone HRC00953 | 12 | 0.00868 | 1.6 | up | unknown |
| 51 | 213411_at | AW242701 | cDNA | cDNA | 7 | 0.00329 | 1.5 | down | unknown |
| | | | DKFZp434E0528 | DKFZp434E0528 | | | | | |
| 52 | 214238_at | AI093572 | clone DT1P1B6 | clone DT1P1B6 | 2 | 0.00262 | 1.5 | down | unknown |
| 53 | 215534_at | AL117546 | cDNA | cDNA | 5 | 0.00262 | 2.5 | up | unknown |
| | | | DKFZp586C1923 | DKFZp586C1923 | | | | | |
| 54 | 216144_at | AL137378 | cDNA | cDNA | 7 | 0.0057 | 1.5 | up | unknown |
| | | | DKFZp434K1126 | DKFZp434K1126 | | | | | |

TABLE 3

| SEQ | | | | | | | | Change | |
|---|---|---|---|---|---|---|---|---|---|
| ID | Probeset | | | | Chromosome | | Fold | Direction | Functional |
| NO | Name | Accession | Description | Symbol | Loci | P-Value | Change | C to B | Category |
| 11 | 207451_at | NM_014360 | NK-2 homolog H | NKX2H | 14q13.1 | 0.00207 | 1.7 | up | oncogenesis/ |
| | | | (Drosophila) | | | | | | transcription |
| 55 | 213889_at | AI742901 | phosphatidylinositol | PIGL | 17p12-p11.2 | 0.00368 | 1.4 | down | biosynthesis |
| | | | glycan, class L | | | | | | |
| 56 | 210624_s_at | BC0000109 | ilvB (bacterial | ILVBL | 19p13.1 | 0.000886 | 1.3 | down | biosynthesis |
| | | | acetolactate | | | | | | |
| | | | synthase)-like | | | | | | |
| 57 | 211928_at | AB002323 | dynein, | DNCH1 | 14q32.3-qter | 0.000886 | 1.5 | up | cell cycle |
| | | | cytoplasmic, | | | | | | |
| | | | heavy | | | | | | |
| | | | polypeptide 1 | | | | | | |
| 2 | 208546_x_at | NM_003524 | H2B histone | H2BFJ | 6p21.3 | 0.00459 | 2.1 | up | Chromosome |
| | | | family, member J | | | | | | |
| 58 | 40489_at | Cluster Incl | dentatorubral- | DRPLA | 12p13.31 | 0.00114 | 1.4 | up | development |
| | | D31840 | pallidoluysian | | | | | | |
| | | | atrophy (atrophin- | | | | | | |
| | | | 1) | | | | | | |
| 59 | 212751_at | BG290646 | ubiquitin- | UBE2N | 12q21.33 | 0.00329 | 1.3 | down | DNA repair |
| | | | conjugating | | | | | | |
| | | | enzyme E2N | | | | | | |
| | | | (UBC13 | | | | | | |
| | | | homolog, yeast) | | | | | | |
| 60 | 214086_s_at | AK001980 | ADP- | ADPRTL2 | 14q11.2-q12 | 0.00368 | 1.4 | up | DNA repair |
| | | | ribosyltransferase | | | | | | |
| | | | (NAD+; | | | | | | |
| | | | poly(ADP-ribose) | | | | | | |
| | | | polymerase)-like 2 | | | | | | |
| 8 | 209791_at | AL049569 | peptidyl arginine | PADI2 | 1p35.2-p35.1 | 0.001 | 1.9 | up | Enzyme |
| | | | deiminase, type II | | | | | | |
| 61 | 212407_at | AL049669 | CGI-01 protein | CGI-01 | 1q24-q25.3 | 0.00262 | 1.3 | down | Enzyme |
| 62 | 211969_at | BG420237 | heat shock 90 kD | HSPCA | 14q32.33 | 0.00459 | 1.2 | up | heat shock |
| | | | protein 1α | | | | | | |
| 63 | 218809_at | NM_024960 | pantothenate | PANK2 | 20p13 | 0.00459 | 1.3 | down | kinase |
| | | | kinase 2 | | | | | | |
| | | | (Hallervorden- | | | | | | |
| | | | Spatz syndrome) | | | | | | |
| 64 | 202325_s_at | NM_001685 | ATP synthase, | ATP5J | 21q21.1 | 0.00164 | 1.3 | down | metabolism |
| | | | H+ transporting, | | | | | | |
| | | | mitochondrial F0 | | | | | | |
| | | | complex, subunit | | | | | | |
| | | | F6 | | | | | | |
| 9 | 210536_s_at | S67798 | sperm adhesion | SPAM1 | 7q31 | 0.00459 | 1.8 | up | metabolism |
| | | | molecule 1 (PH- | | | | | | |
| | | | 20 hyaluronidase, | | | | | | |
| | | | zona pellucida | | | | | | |
| | | | binding) | | | | | | |
| 65 | 200641_s_at | U28964 | tyrosine 3- | YWHAZ | 8q23.1 | 0.00262 | 1.3 | up | metabolism |
| | | | monooxygenase/tryptophan | | | | | | |
| | | | 5- | | | | | | |
| | | | monooxygenase | | | | | | |
| | | | activation protein, | | | | | | |
| | | | zeta polypeptide | | | | | | |
| 10 | 205450_at | NM_002637 | phosphorylase | PHKA1 | Xq12-q13 | 0.00233 | 1.5 | up | metabolism |
| | | | kinase, alpha 1 | | | | | | |
| | | | (muscle) | | | | | | |
| 66 | 212159_x_at | AI125280 | adaptor-related | AP2A2 | 11 | 0.000467 | 1.3 | up | others |
| | | | protein complex 2 | | | | | | |
| 44 | 215019_x_at | AW474158 | KIAA1827 protein | KIAA1827 | 19q13 | 0.00294 | 2.1 | up | others |
| 67 | 221549_at | AF337808 | glutamate rich | GRWD | 19q13.33 | 0.000781 | 1.5 | up | others |
| | | | WD repeat | | | | | | |
| | | | protein GRWD | | | | | | |
| 15 | 201053_s_at | NM_006814 | proteasome | PSMF1 | 20p12.2-p13 | 0.00114 | 1.6 | down | proteasome |
| | | | (prosome, | | | | | | |
| | | | macropain) | | | | | | |
| | | | inhibitor subunit 1 | | | | | | |
| | | | (PI31) | | | | | | |
| 13 | 210551_s_at | BC001620 | acetylserotonin | ASMT | Xp22.3 or | 0.00207 | 2.1 | down | protein |
| | | | O- | | Yp11.3 | | | | synthesis |
| | | | methyltransferas | | | | | | |
| 68 | 204741_at | NM_001714 | Bicaudal D | BICD1 | 12p11.2-p11.1 | 0.00459 | 1.5 | up | RNA |
| | | | homolog 1 | | | | | | processing |
| | | | (Drosophila) | | | | | | |
| 36 | 203311_s_at | M57763 | ADP-ribosylation | ARF6 | 7q22.1 | 0.000886 | 1.5 | up | Signal |
| | | | factor 6 | | | | | | transduction |
| 69 | 213795_s_at | AL121905 | protein tyrosine | PTPRA | 20p13 | 0.00184 | 1.4 | down | signal |
| | | | phosphatase, | | | | | | transduction/ |
| | | | receptor type, A | | | | | | receptor |
| 17 | 211265_at | U13216 | prostaglandin E | PTGER3 | 1p31.2 | 0.00368 | 1.7 | down | signal |
| | | | receptor 3 | | | | | | transduction/ |
| | | | (subtype EP3) | | | | | | transcription/ |
| | | | | | | | | | Apoptosis |
| 70 | 202568_s_at | AI745639 | MAP/microtubule | MARK3 | 14q32.3 | 0.00164 | 1.3 | up | structure |
| | | | affinity-regulating | | | | | | |
| | | | kinase 3 | | | | | | |
| 33 | 212253_x_at | BG253119 | bullous | BPAG1 | 6p12-p11 | 0.00329 | 1.7 | up | structure |
| | | | pemphigoid | | | | | | |
| | | | antigen 1, | | | | | | |
| | | | 230/240 kDa | | | | | | |
| 34 | 208920_at | AV752215 | sorcin | SRI | 7q21.1 | 0.00368 | 1.8 | down | structure |
| 71 | 202136_at | BE250417 | adenovirus 5 E1A | BS69 | 10p14 | 0.00294 | 1.1 | down | transcription/ |
| | | | binding protein | | | | | | cell |
| | | | | | | | | | proliferation |
| 26 | 202320_at | NM_001520 | general | GTF3C1 | 16p12 | 0.00294 | 1.5 | up | transcription/ |
| | | | transcription | | | | | | cell |
| | | | factor IIIC, | | | | | | proliferation |
| | | | polypeptide 1 | | | | | | |
| 72 | 201200_at | NM_003851 | cellular repressor | CREG | 1q24 | 0.00128 | 1.4 | down | transcription/ |
| | | | of E1A-stimulated | | | | | | cell |
| | | | genes | | | | | | proliferation |
| 47 | 212650_at | BF116032 | KIAA0903 protein | KIAA0903 | 2p13.3 | 0.00207 | 1.6 | up | tumor related |
| 41 | 220583_at | NM_025086 | hypothetical | FLJ22596 | 11q13.3 | 0.00164 | 2.0 | up | unknown |
| | | | protein FLJ22596 | | | | | | |
| 73 | 219816_s_at | NM_018107 | hypothetical | FLJ10482 | 14q11.1 | 0.000532 | 1.2 | up | unknown |
| | | | protein FLJ10482 | | | | | | |
| 74 | 219670_at | NM_024603 | hypothetical | FLJ11588 | 1p32.3 | 0.00294 | 1.4 | up | unknown |
| | | | protein FLJ11588 | | | | | | |
| 75 | 201581_at | BF572868 | hypothetical | DJ971N18.2 | 20p12 | 0.00459 | 1.5 | down | unknown |
| | | | protein | | | | | | |
| | | | DJ971N18.2 | | | | | | |
| 76 | 204594_s_at | NM_013298 | hypothetical | HSU79252 | 22q13 | 0.000688 | 1.3 | down | unknown |
| | | | protein | | | | | | |
| | | | HSU79252 | | | | | | |
| 77 | 221257_x_at | NM_030793 | hypothetical | SP329 | 5q33.1 | 0.00164 | 1.2 | down | unknown |
| | | | protein SP329 | | | | | | |
| 78 | 217972_at | NM_017812 | hypothetical | FLJ20420 | 7q31.31 | 0.00184 | 1.4 | down | unknown |
| | | | protein FLJ20420 | | | | | | |
| 52 | 214238_at | AI093572 | clone DT1P1B6, | DT1P1B | 2 | 0.00262 | 1.5 | down | unknown |
| | | | CAG repeat | | | | | | |
| | | | region | | | | | | |
| 53 | 215534_at | AL117546 | cDNA | DKFZp586C1923 | 5 | 0.00262 | 2.5 | up | unknown |
| | | | DKFZp586C1923 | | | | | | |
| 79 | 214153_at | BE467941 | clone | ELOVL5 | 6 | 0.00262 | 1.4 | up | unknown |
| | | | IMAGE: 3944293 | | | | | | |
| 80 | 214896_at | AL109671 | cDNA clone | EUROIMAGE | 15 | 0.000532 | 1.6 | up | unknown |
| | | | EUROIMAGE | 29222 | | | | | |
| | | | 29222 | | | | | | |
| 38 | 219103_at | NM_017707 | up-regulated in | UPLC1 | 1p36.11 | 0.00368 | 1.9 | up | unknown |
| | | | liver cancer 1 | | | | | | |
| 46 | 220144_s_at | NM_022096 | ankyrin repeat | ANKRD5 | 20pter-q11.23 | 0.00207 | 1.9 | down | unknown |
| | | | domain 5 | | | | | | |
| 81 | 222154_s_at | AK002064 | DKFZP564A2416 | DKFZP564A2416 | 2q33.1 | 0.00411 | 1.3 | up | unknown |
| | | | protein | | | | | | |
| 48 | 200906_s_at | AK025843 | palladin | KIAA0992 | 4q32.3 | 0.00233 | 1.5 | up | unknown |

we claim:

1. A method of classifying a human colorectal tumor comprising the steps of:
obtaining an unknown sample derived from a human colorectal tumor;
determining the gene expression level of each of at least five informative genes in the unknown sample, wherein informative genes are selected from the group consisting of:
a first group of genes that are expressed at higher levels in Dukes' C tumors than in Dukes' B tumors, wherein the first group consists of H2BFH, H2BFJ, LENEP, SPON1, PC, PADI2, SPAM1, PHKA1, NKX2H, RAB7, SPN, BAIAP3, DVL2, GRB14, SRCAP, GTF3C1, RUNX1, SYNGR3, PPL, NPIP, BPAG1, ARF6, PNMA1, UPLC1, BAI3, FLJ22596, FLJ10251, KIAA1827, CLIPR-59, KIAA0903, KIAA0992, FLB4237, clone HRC00953, cDNA DKFZp586C1923, cDNA DKFZp434K1126, DNCH1, DRPLA, ADPRTL2, HSPCA, YWHAZ, AP2A2, GRWD, BICD1, MARK3, FLJ10482, FLJ11588, ELOVL5, EUROIMAGE 29222, and DKFZP564A2416, and
a second group of genes that are expressed at lower levels in Dukes° C tumors than in Dukes' B tumors, wherein the second group consists of FUT4, NDUFB7, ASMT, CASP5, PSMF1, PTGER3, FLB0708, RPS21, KIAA0734, FZD3, EIF1A, NEBL, SRI, KCNJ6, ANKRD5, SSX2, AF098968, DJ971N18.2, HSU79252, SP329, FLJ20420, DT1P1B, cDNA DKFZp434E0528, PTPRA, BS69, CREG, PIGL, ILVBL, PANK2, ATP5J, CGI-01, and UBE2N;
comparing the gene expression level of each of the at least five informative genes in the unknown sample to the average gene expression level of that gene in a plurality of reference samples that are Dukes' B stage to determine if each of the at least five informative genes is expressed at higher or lower levels in the unknown sample relative to the plurality of reference samples; and,
classifying the unknown sample as Dukes' C stage if each of the informative genes selected from the first group is expressed at higher levels in the unknown sample than the average expression of that gene in the plurality of reference samples and if each of the informative genes selected from the second group is expressed at lower levels in the unknown sample than the average expression of that gene in the plurality of reference samples.

2. The method of claim 1 wherein at least twenty informative genes are analyzed at each step.

3. The method of claim 2 wherein the at least twenty informative genes are NKX2H, H2BFJ, PADI2, SPAM1, PHKA1, KIAA1827, PSMF1, ASMT, ARF6, PTGER3, BPAG1, SRI, GTF3C1, KIAA0903, FLJ22596, DT1P1B, DKFZp586C1923, UPLC1, ANKRD5, and KIAA0992.

4. The method of claim 1 wherein the gene expression level of each of the at least five informative genes is determined by hybridization to an array of nucleic acid probes.

5. The method of claim 4 wherein the array of nucleic acid probes comprises SEQ ID NOs 102-321.

6. A method of identifying compounds that inhibit or promote metastasis of a colorectal tumor to the regional lymph nodes comprising:
obtaining a first sample of cells from a colorectal tumor before treatment;
treating the tumor with the compound;
obtaining a second sample of cells from the tumor after treatment;
determining the expression level of at least five informative genes in the first and second samples, wherein the at least five informative genes are selected from the group consisting of H2BFH, H2BFJ, LENEP, SPON1, FUT4, PC, NDUFB7, PADI2, SPAM1, PHKA1, NKX2H, RAB7, ASMT, CASP5, PSMF1, SPN, PTGER3, FLB0708, RPS21, BAIAP3, KIAA0734, DVL2, GRB14, FZD3, SRCAP, GTF3C1, RUNX1, EIF1A, NEBL, SYNGR3, PPL, NPIP, BPAG1, SRI, KCNJ6, ARF6, PNMA1, UPLC1, BAI3, SSX2, FLJ22596, FLJ10251, AF098968, KIAA1827, CLIPR-59, ANKRD5, KIAA0903, KIAA0992, FLB4237, clone HRC00953, cDNA DKFZp434E0528, cDNA DKFZp586C1923, cDNA DKFZp434K1126, PIGL, ILVBL, DNCH1, DRPLA, UBE2N, ADPRTL2, CGI-01, HSPCA, PANK2, ATP5J, YWHAZ, AP2A2, GRWD, BICD1, PTPRA, MARK3, BS69, CREG, FLJ10482, FLJ11588, DJ971N18.2, HSU79252, SP329, FLJ20420, DT1P1B, ELOVL5, EUROIMAGE 29222, and DKFZP564A2416;
determining the direction of change between the expression level of each of the at least five informative gene in the first and second samples;
identifying the compound as a promoter of metastasis if the direction of change for each of the at least five informative genes is:
up and the gene is selected from the group consisting of H2BFH, H2BFJ, LENEP, SPON1, PC, PADI2, SPAM1, PHKA1, NKX2H, RAB7, SPN, BAIAP3, DVL2, GRB14, SRCAP, GTF3C1, RUNX1, SYNGR3, PPL, NPIP, BPAG1, ARF6, PNMA1, UPLC1, BAI3, FLJ22596, FLJ10251, KIAA1827, CLIPR-59, KIAA0903, KIAA0992, FLB4237, clone HRC00953, cDNA DKFZp586C1923, cDNA DKFZp434K1126, DNCH1, DRPLA, ADPRTL2, HSPCA, YWHAZ, AP2A2, GRWD, BICD1, MARK3, FLJ10482, FLJ11588, ELOVL5, EUROIMAGE 29222, and DKFZP564A2416; or
down and the gene is selected from the group consisting of FUT4, NDUFB7, ASMT, CASP5, PSMF1, PTGER3, FLB0708, RPS21, KIAA0734, FZD3, EIF1A, NEBL, SRI, KCNJ6, ANKRD5, SSX2, AF098968, DJ971N18.2, HSU79252, SP329, FLJ20420, DT1P1B, cDNA DKFZp434E0528, PTPRA, BS69, CREG, PIGL, ILVBL, PANK2, ATP5J, CGI-01, and UBE2N;or,
identifying the compound as an inhibitor of metastasis if the direction of change for each of the at least five informative genes is:
down and the gene is selected from the group consisting of H2BFH, H2BFJ, LENEP, SPON1, PC, PADI2, SPAM1, PHKA1, NKX2H, RAB7, SPN, BAIAP3, DVL2, GRB14, SRCAP, GTF3C1, RUNX1, SYNGR3, PPL, NPIP, BPAG1, ARF6, PNMA1, UPLC1, BAI3, FLJ22596, FLJ10251, KIAA1827, CLIPR-59, KIAA0903, KIAA0992, FLB4237, clone HRC00953, cDNA DKFZp586C1923, cDNA DKFZp434K1126, DNCH1, DRPLA, ADPRTL2, HSPCA, YWHAZ, AP2A2, GRWD, BICD1, MARK3, FLJ10482, FLJ11588, ELOVL5, EUROIMAGE 29222, and DKFZP564A2416; or
up and the gene is selected from the group consisting of FUT4, NDUFB7, ASMT, CASP5, PSMF1, PTGER3, FLB0708, RPS21, KIAA0734, FZD3, EIF1A, NEBL, SRI, KCNJ6, ANKRD5, SSX2, AF098968, DJ971N18.2, HSU79252, SP329, FLJ20420, DT1P1B, cDNA DKFZp434E0528, PTPRA, BS69, CREG, PIGL, ILVBL, PANK2, ATP5J, CGI-01, and UBE2N.

7. The method of claim 6 wherein at least twenty informative genes are analyzed at each step.

8. The method of claim 7 wherein the at least twenty informative genes are NKX2H, H2BFJ, PADI2, SPAM1, PHKA1, KIAA1827, PSMF1, ASMT, ARF6, PTGER3, BPAG1, SRI, GTF3C1, KIAA0903, FLJ22596, DT1P1B, DKFZp586C1923, UPLC1, ANKRD5, and KIAA0992..

9. The method of claim 6 wherein gene expression level is determined using an array of nucleic acid probes.

10. A method of predicting the efficacy of a compound for treating a colorectal tumor comprising the steps of:
obtaining a first sample of cells derived from a colorectal tumor before treatment with the compound and a second sample of cells derived from the same tumor after treatment;
determining a gene expression level for at least five informative genes in the first and second sample, wherein informative genes are selected from the group consisting of H2BFH, H2BFJ, LENEP, SPON1, FUT4, PC, NDUFB7, PADI2, SPAM1, PHKA1, NKX2H, RAB7, ASMT, CASP5, PSMF1, SPN, PTGER3, FLB0708, RPS21, BAIAP3, KIAA0734, DVL2, GRB14, FZD3, SRCAP, GTF3C1, RUNX1, EIF1A, NEBL, SYNGR3, PPL, NPIP, BPAG1, SRI, KCNJ6, ARF6, PNMA1, UPLC1, BAI3, SSX2, FLJ22596, FLJ10251, AF098968, KIAA1827, CLIPR-59, ANKRD5, KIAA0903, KIAA0992, FLB4237, clone HRC00953, cDNA DKFZp434E0528, cDNA DKFZp586C1923, cDNA DKFZp434K1126, PIGL, ILVBL, DNCH1, DRPLA, UBE2N, ADPRTL2, CGI-01, HSPCA, PANK2, ATP5J, YWHAZ, AP2A2, GRWD, BICD1, PTPRA, MARK3, BS69, CREG, FLJ10482, FLJ11588, DJ971N18.2, HSU79252, SP329, FLJ20420, DT1P1B, ELOVL5, EUROIMAGE 29222, and DKFZP564A2416;
comparing the gene expression level of each of the at least five informative gene in the first and second samples to determine a direction of change in expression from the first to the second sample for each gene, wherein the direction is either up or down;
comparing the direction of change for each gene to the direction of change for that gene from a sample of a first known stage to a sample of a second known stage, wherein the first stage is more advanced than the second stage; and
identifying the compound as effective if the direction of change for each of the at least five informative genes is the same.

11. The method of claim 10 wherein gene expression levels are determined using an array of nucleic acid probes.

12. The method of claim 10 wherein at least twenty informative genes are analyzed at each step.

13. The method of claim 12 wherein the at least twenty informative genes are NKX2H, H2BFJ, PADI2, SPAM1, PHKA1, KIAA1827, PSMF1, ASMT, ARF6, PTGER3, BPAG1, SRI, GTF3C1, KIAA0903, FLJ22596, DT1P1B, DKFZp586C1923, UPLC1, ANKRD5, and KIAA0992.

14. A method of screening to identify test substances which induce or repress expression of genes which are induced or repressed in a colorectal tumor sample that has metastasized compared to a colorectal tumor sample that has not metastasized, comprising:
contacting a colorectal tumor cell with a test substance;
monitoring expression of a transcript or its translation product wherein the transcript is from a gene selected from the group consisting of H2BFH, H2BFJ, LENEP, SPON1, FUT4, PC, NDUFB7, PADI2, SPAM1, PHKA1, NKX2H, RAB7, ASMT, CASP5, PSMF1, SPN, PTGER3, FLB0708, RPS21, BAIAP3, KIAA0734, DVL2, GRB14, FZD3, SRCAP, GTF3C1, RUNX1, EIF1A, NEBL, SYNGR3, PPL, NPIP, BPAG1, SRI, KCNJ6, ARF6, PNMA1, UPLC1, BAI3, SSX2, FLJ22596, FLJ10251, AF098968, KIAA1827, CLIPR-59, ANKRD5, KIAA0903, KIAA0992, FLB4237, clone HRC00953, cDNA DKFZp434E0528, cDNA DKFZp586C1923, cDNA DKFZp434K1126, PIGL, ILVBL, DNCH1, DRPLA, UBE2N, ADPRTL2, CGI-01, HSPCA, PANK2, ATP5J, YWHAZ, AP2A2, GRWD, BICD1, PTPRA, MARK3, BS69, CREG, FLJ10482, FLJ1588, DJ971N18.2, HSU79252, SP329, FLJ20420, DT1P1B, ELOVL5, EUROIMAGE 29222, and DKFZP564A2416;.

15. A method of distinguishing between a Dukes' B and a Dukes' C stage tumor comprising: monitoring the expression level of any five or more genes selected from the group consisting of H2BFH, H2BFJ, LENEP, SPON1, FUT4, PC, NDUFB7, PADI2, SPAM1, PHKA1, NKX2H, RAB7, ASMT, CASP5, PSMF1, SPN, PTGER3, FLB0708, RPS21, BAIAP3, KIAA0734, DVL2, GRB14, FZD3, SRCAP, GTF3C1, RUNX1, EIF1A, NEBL, SYNGR3, PPL, NPIP, BPAG1, SRI, KCNJ6, ARF6, PNMA1, UPLC1, BAI3, SSX2, FLJ22596, FLJ10251, AF098968, KIAA1827, CLIPR-59, ANKRD5, KIAA0903, KIAA0992, FLB4237, clone HRC00953, cDNA DKFZp434E0528, cDNA DKFZp586C1923, cDNA DKFZp434K1126, PIGL, ILVBL, DNCH1, DRPLA, UBE2N, ADPRTL2, CGI-01, HSPCA, PANK2, ATP5J, YWHAZ, AP2A2, GRWD, BICD1, PTPRA, MARK3, BS69, CREG, FLJ10482, FLJ11588, DJ971N18.2, HSU79252, SP329, FLJ20420, DT1P1B, ELOVL5, EUROIMAGE 29222, and DKFZP564A2416; and comparing the expression levels to a database of expression levels of the five or more genes in Dukes' B and Dukes' C stage tumors.

16. The method of claim 15 wherein the expression level of at least twenty genes are monitored and compared.

17. The method of claim 16 wherein the at least twenty genes are NKX2H, H2BFJ, PADI2, SPAM1, PHKA1, KIAA1827, PSMF1, ASMT, ARF6, PTGER3, BPAG1, SRI, GTF3C1, KIAA0903, FLJ22596, DT1P1B, DKFZp586C1923, UPLC1, ANKRD5, and KIAA0992.

18. A method of classifying a colorectal tumor sample as being positive for regional lymph node metastases comprising:
isolating a nucleic acid sample from the colorectal tumor sample;
determining the expression level of at least five informative genes in the sample, wherein informative genes are selected from the group consisting of H2BFH, H2BFJ, LENEP, SPON1, FUT4, PC, NDUFB7, PADI2, SPAM1, PHKA1, NKX2H, RAB7, ASMT, CASP5, PSMF1, SPN, PTGER3, FLB0708, RPS21, BAIAP3, KIAA0734, DVL2, GRB14, FZD3, SRCAP, GTF3C1, RUNX1, EIF1A, NEBL, SYNGR3, PPL, NPIP, BPAG1, SRI, KCNJ6, ARF6, PNMA1, UPLC1, BAI3, SSX2, FLJ22596, FLJ10251, AF098968, KIAA1827, CLIPR-59, ANKRD5, KIAA0903, KIAA0992, FLB4237, clone HRC00953, cDNA DKFZp434E0528, cDNA DKFZp586C1923, cDNA DKFZp434K1126, PIGL, ILVBL, DNCH1, DRPLA, UBE2N, ADPRTL2, CGI-01, HSPCA, PANK2, ATP5J, YWHAZ, AP2A2, GRWD, BICD1, PTPRA, MARK3, BS69, CREG, FLJ10482, FLJ11588, DJ971N18.2, HSU79252, SP329, FLJ20420, DT1P1B, ELOVL5, EUROIMAGE 29222, and DKFZP564A2416;
comparing the expression level of the at least five informative genes to the expression level of the same informative genes in at least one reference colorectal tumor sample that is negative for regional lymph node metastases;
determining if the one or more informative gene in the colorectal tumor sample is expressed at a higher level or a lower level relative to the reference; and
classifying the sample as having regional lymph node metastases if the direction of change in the expression of the at least five informative genes in the unknown sample relative to the reference is the same as the direction of change for that gene in Tables 2 and 3.

19. A kit for classifying a colorectal tumor sample as being positive for regional lymph node metastases comprising:
an array of probes wherein each probe is perfectly complementary to a single gene selected from the group of genes consisting of H2BFH, H2BFJ, LENEP, SPON1, FUT4, PC, NDUFB7, PADI2, SPAM1, PHKA1, NKX2H, RAB7, ASMT, CASP5, PSMF1, SPN, PTGER3, FLB0708, RPS21, BAIAP3, KIAA0734, DVL2, GRB14, FZD3, SRCAP, GTF3C1, RUNX1, EIF1A, NEBL, SYNGR3, PPL, NPIP, BPAG1, SRI, KCNJ6, ARF6, PNMA1, UPLC1, BAI3, SSX2, FLJ22596, FLJ10251, AF098968, KIAA1827, CLIPR-59, ANKRD5, KIAA0903, KIAA0992, FLB4237, clone HRC00953, cDNA DKFZp434E0528, cDNA DKFZp586C1923, cDNA DKFZp434K1126, PIGL, ILVBL, DNCH1, DRPLA, UBE2N, ADPRTL2, CGI-01, HSPCA, PANK2, ATP5J, YWHAZ, AP2A2, GRWD, BICD1, PTPRA, MARK3, BS69, CREG, FLJ10482, FLJ11588, DJ971N18.2, HSU79252, SP329, FLJ20420, DT1P1B, ELOVL5, EUROIMAGE 29222, and DKFZP564A2416; and wherein the array comprises at least 2 probes for each gene in the group of genes;
a computer-readable medium having computer-executable instructions for performing a method comprising: comparing the gene expression level of at least three informative genes in an experimental sample to the expression level of the corresponding gene in a plurality of samples of known Dukes' stage wherein the Dukes' stage is selected from Dukes' B and Dukes' C and determining if the experimental sample is Dukes' B or Dukes' C stage; and
a computer-readable medium having a plurality of gene expression level values for each of the genes in the group of genes in a plurality of colorectal tumor samples of known Dukes' stage.

The application's sequence listing, which the Patent Office published only in electronic form, follows.

SEQUENCE LISTING (81 sequences)

SEQ ID NO: 1 - DNA, 435 bp, homo sapien
atgcctgagccagcgaaatccgctcccgccccgaagaagggctccaagaaggccgtgaccaaggcgcagaagaaggacggcaagaagcgcaagcgcagccgcaaggagagctactccgtatacgtgtacaaggtgctgaaacaggtccaccccgacaccggcatctcctctaaagccatggggatcatgaattcctttgtcaacgacatcttcgagcgcatcgccggcgaggcttcccgcctggcgcattacaacaagcgctcgaccatcacctccagggagatccagacggccgtgcgcctgctgcttcccggggagctggccaagcacgctgtgtcagagggcaccaaggccgttaccaagtacaccagctccaagtaaacttgtccctgcaactgccttagtaaacccaaaggctcttttcagagccactca

SEQ ID NO: 2 - DNA, 425 bp, homo sapien
atgcctgatccagctaagtccgctcccgccccgaagaagggctccaagaaggcggtgaccaaggcgcagaagaaggatggcaagaagcgtaaacgcagccgcaaggagagctactccgtatacgtttacaaggtgctgaagcaagtccaccccgacaccggcatctcctccaaagccatggggatcatgaattcctttgtcaacgatatcttcgagcgcatcgccggcgaggcttcccgcctggctcattacaacaagcgttcgaccatcacctccagggagatccagacagccgtgcgcctgctgctgcctggggaactggccaagcacgccgtgtccgagggcactaaggccgtcaccaagtacaccagctccaaataaatggacgcatgttcaaacccaaaggctcttttcagagccactta

SEQ ID NO: 3 - DNA, 632 bp, homo sapien
cttcctcggaactgttgcccacatgcagccccggacacagcccctagcccaaaccctacccttcttcctcggaggggcccctcgagacactgggctgcgggtgcctgtcattaagatgggcacagggtgggagggcttccagcggaccctgaaggaagtcgcctacatcctcctctgctgctggtgtatcaaggaactgctggattaatggtagcagggaactgcctcctctccccaccagcaccatggctggcatcgctcagcccccagcccaattgccatcaagactcctgaagccagctgtgcttgaccaaggatgggccataaacaatgagtaaacagtaaagtgtggatcctgctttgagctgtgtcatctagcagacctgcctcatctctgagcctccttcattcccaacccctgcctctggtggacctctggtgggcaggagcttggactgctctggctaggaccccagtaagattgtggcaagacctggcactcctccaagcttggcacagtgagcccaccagctcagatggttgatcttaccataccctcatagtaccaagaatggactgccccctaagaaacctgtttgagaatcactgaattaaaaatataatccataggc

SEQ ID NO: 4 - DNA, 555 bp, homo sapien
  misc_feature (9)..(10): n is a, c, g, or t
tttttattnnttcagttctgggtctatagaaacccagggggattttcatttgctacaacagattcccttctaataaaatgcactggcaaggtgaccagtgagtgacccaatgtctggttgggaaatctctctctgaacttcttgctgttggacctaaaatgtggatgtaaattggatcacagctggtttggcattgaaaaaaatacatacacaacaaacaattacaacttctttatatggcagtttttactgggtgtctaatactctctttactgtctcaagtggaagtccaaacaaatttcatttttgtagtaaaaaatctttatttccaaaatgatttgttagccaaaagaactataaaccacctaacaagactttggtaagaaagagacttgatgcttcttataaattccccattgcaaacaaaaaataacaatccaacaagagtcatgttacccattcttagccattaacctggttttaagtctccaaaatcaggattttaaaatgtacccaactgggaccaaatacaaacatgagacactagggtggctt

SEQ ID NO: 5 - DNA, 4192 bp, homo sapien
  misc_feature (1259)..(1259): n is a, c, g, or t
  misc_feature (1389)..(1389): n is a, c, g, or t
  misc_feature (2541)..(2541): n is a, c, g, or t
tgaagccgcgctcccctggaagcgacccaggggaggccaagttgtcagctttttgatcctctactgtgcatctccttgactgccgcatcatgggagtaagttcttcaaacacccatttttgctctatgggaaaaaaacgatttaccaattaatattactcagcacagagatgggggcccggtttccatattttttgcacagctagcaattgggctccctttgctgctgatgggcatcattgtttaggggtgaaggagggggttcttcctcaccttgtaaccagtgcagaaatgaaatagcttagcggcaagaagccgttgaggcggtttcctgaatttccccatctgccacaggccatatttgtggcccgtgcagcttccaaatctcatacacaactgttcccgattcacgtttttctggaccaaggtgaagcaaatttgtggttgtagaaggagccttgttggtggagagtggaaggactgtggctgcaggtgggactttgttgtttggattcctcacagccttggctcctgagaaaggtgaggagggcagtccaagaggggccgctgacttctttcacaagtactatctgttcccctgtcctgtgaatggaagcaaagtgctggattgtccttggaggaaacttaagatgaatacatgcgtgtacctcactttacataagaaatgtattcctgaaaagctgcatttaaatcaagtcccaaattcattgacttaggggagttcagtatttaatgaaaccctatggagaatttatccctttacaatgtgaatagtcatctcctaatttgtttcttctgtctttatgtttttctataacctggattttttaaatcatattaaaattacagatgtgaaaataaagcagaagcaacctttttccctcttcccagaaaaccagtctgtgtttacagacagaagagaaggaagccatagtgtcacttccacacaattatttatttcatgtctttactggacctgaaatttaaactgcaatgccagtcctgcaggagtgctggcattaccctctgcagaacagtgaaaggtattgcactacattatggaatcatgcaaaaggaaaaaaagtttcatgatatctgttgttggcagtttttgtttatctctgacagtttttagttaaatgtttagatcctcagaactacattagtgcctactattaacttactctgtctcttgttaaaggctaaatctgcgcttctccctggtgccagcaggttccnctcacagtcaatgcagtggtatagcatatcctcacatttctagtgcccttgagactgtgctatggaaccaatcttgaacatacatgcattgacttgacaagttactgagtaagcagcatatcagcaaggngccactacagcctactctgccagacactgagcttggggccctagggaagatagagaattatacaaggcaaagtccttctctttagggctcttacaatctatcacttccaaaaagtaaatggtgactgataaaacaattggcagaacctgtttgattactgtgacagtcttaatgataccataaatcaatattagaaagctagttgacttaaagcctgaaataatgggagttttctcctccacttattagaataaggaccctcagtgactaattattgtgggtagggtcaagattaactagttttatacagagttctgctgtaaatagtcattttgcattgattagtgcagttctctgaatcataaagcaagttttacctctctgtacatgtttttgcagacatacttgaaaagctccttaaatctaggtgcttcaattcagcttttcttgagagcacaaatgaaaagctgtggagaaaatgtcctcattaaagtattaaagtgtgggcagaattacaattacaaagtgccagccaccgaataaagataaaagttcagttccttaaaatgagtttttatgagataacagtcagtgatcttggtgttaccgggattccacatggggcagtgggaaagagttcaggttttgaaggtaacctagtttagatttgaattccagctatgtgacattgggtaaatttgtagtagtcctgagcctcagcgtcctcatctataaaatgactggcgaaaatacttcacaagctcattttgagcactttaggaagtaagtgaaagtacctaaaatagcaggcacccaattgatgattttatatcttccttctttgcttgcagtgatttcaggatgtcctcatatctatttataggtctaaaattatatcttaaagtatgttgtagaataaattaaaaggataactaaatcaccatttagattaagcttgacttgcaaactaggaagaagcacctaggcctttctttgaaaatatttttttggttcgttttggtaaagctctataaattggtatctattattttaccaatttttttttagtagtaagtccatttagagaactaaccatattatttatggaataattagcatgaggaaggtataattgcattttttttttttttnagacggagcttgcactgtagccccagctggactgcagtggcgtgatcttggctcactgcaacctccgcctcccaggttcaagcgattctcctgcctcagcctcccgagcagctgagactacaggcgcctgccaccacgcctggccaattttttttttttttagtagagactgcgtttcaccatgttgggcaggctggtcttgaactcctgaccttgtgatccacctgcctcggctctcagagagctgggattacaggtgtgagccgccgtgcccagccattgcatttttattcacatacacattgttaatgtggaacaatttaacactaatctcatcagagagcgagatgaatgtggcaattgctcattttattttgcatatattaaattgagtaggttcagctctaacataccttaagaaaaatgcatatcggtgcactgtatgtatttcaaaatgcctttcctatgattgtcatgtcctcctttaaggcttttccctcaaatttattacaaatttagtatttttagtacttgatgactctaattacatgaatgcacctggaatgacatttgtaacagaagacggtctgacttgctttcagtattcacaagttctttccagtttccaagtcttttcctagcagtaatttaggggagacagaggagtttcatgtaaagagcatgcagtttggagtcagaacctgggtatgactctgtggccttgatgaagcaagttacttaaactcttgagttttagctttctcctttacaatgcatgaatgcctatccccctacaaaacaaagattaaatgtgatgatgtatgccaaggcgctttgtatattgtaaagtgctatataattataagatgttctaaattttcaaggacctaaaccaggcattggcaaacgtttttccagggagtaaatattttacgctttgcatatataatttatggaggtgttgagaggatagattagacacttgaagtactcaggatagtgcctggcatgtaggaagcacctggaaaatattcgctgtgattaccatcagtccattttaccgaggaaggagccaaggtccaggcccactgaagggacttgcataacattacaatagcagtggcagaaccagccatgcttctgcaaatcacaacctctttgagcctctgtcacctgaactgcaaaatgagtgggttagacaaaatcatctgttgggacctcctagttccacggtgctatcattctaccaactggcgccctaaggttgaaagtgcttatctgctttccaatgtggcttccttacagtctggaactgcaatatgcaggagcagtaaactggcagaaaaccaggaatcagagaaagaaaatataatttaactttaaagatgtaaattatatatatagtatattatatatatttttaaagctttatatgcctcaaatatcagggaaaggagccaagtccttggtatttagtttggtgaatacttgcattgaatacatgtcaagatgtcaagacatttttgaatgtgtctcagggatttctatgctacacattcttttaacaaatcaagtatttatgtacacatgttcagattttttgacaaaatgattaaaataatgagatggaaaatgaaaaaaaaaaaaaaaa

SEQ ID NO: 6 - DNA, 4041 bp, homo sapien
agttctggaaagtcattgacaggggattaacctagaacatcaattataaacaggcagcaggcctcaggcccagacttgggtgttacaggaacagtgtggcctctctggaactctgcagaccacctgccgtgatgctgaagttccgaacagtccatgggggcctgaggctcctgggaatccgccgaacctccaccgcccccgctgcctccccaaatgtccggcgcctggagtataagcccatcaagaaagtcatggtggccaacagaggtgagattgccatccgtgtgttccgggcctgcacggagctgggcatccgcaccgtagccatctactctgagcaggacacgggccagatgcaccggcagaaagcagatgaagcctatctcatcggccgcggcctggcccccgtgcaggcctacctgcacatcccagacatcatcaaggtggccaaggagaacaacgtagatgcagtgcaccctggctacgggttcctctctgagcgagcggacttcgcccaggcctgccaggatgcaggggtccggtttattgggccaagcccagaagtggtccgcaagatgggagacaaggtggaggcccgggccatcgccattgctgcgggtgttcccgttgtccctggcacagatgcccccatcacgtccctgcatgaggcccacgagttctccaacacctacggcttccccatcatcttcaaggcggcctatgggggtggagggcgtggcatgagggtggtgcacagctacgaggagctggaggagaattacacccgggcctactcagaggctctggccgcctttgggaatggggcgctgtttgtggagaagttcatcgagaagccacggcacatcgaggtgcagatcttgggggaccagtatgggaacatcctgcacctgtacgagcgagactgctccatccagcggcggcaccagaaggtggtcgagattgcccccgccgcccacctggacccgcagcttcggactcggctcaccagcgactctgtgaaactcgctaaacaggtgggctacgagaacgcaggcaccgtggagttcctggtggacaggcacggcaagcactacttcatcgaggtcaactcccgcctgcaggtggagcacacggtcacagaggagatcaccgacgtagacctggtccatgctcagatccacgtgtctgagggcaggagcctacccgacctgggcctgcggcaggagaacatccgcatcaacgggtgtgccatccagtgccgggtcaccaccgaggaccccgcgcgcagcttccagccggacaccggccgcattgaggtgttccggagcggagagggcatgggcatccgcctggataatgcttccgccttccaaggagccgtcatctcgccccactacgactccctgctggtcaaagtcattgcccacggcaaagaccaccccacggccgccaccaagatgagcagggcccttgcggagttccgcgtccgaggtgtgaagaccaacatcgccttcctgcagaatgtgctcaacaaccagcagttcctggcaggcactgtggacacccagttcatcgacgagaacccagagctgttccagctgcggcctgcacagaaccgggcccaaaagctgttgcactacctcggccatgtcatggtaaacggtccaaccaccccgattcccgtcaaggccagccccagccccacggaccccgttgtccctgcagtgcccataggcccgcccccggctggtttcagagacatcctgctgcgagaggggcctgagggctttgctcgagctgtgcggaaccacccggggctgctgctgatggacacgaccttcagggacgcccaccagtcactgctggccactcgtgtgcgcacccacgatctcaaaaagatcgccccctatgttgcccacaacttcagcaagctcttcagcatggagaactggggaggagccacgtttgacgtcgccatgcgcttcctgtatgagtgcccctggcggcggctgcaggagctccgggagctcatccccaacatccctttccagatgctgctgcggggggccaatgctgtgggctacaccaactacccagacaacgtggtcttcaagttctgtgaagtggccaaagagaatggcatggatgtcttccgtgtgtttgactccctcaactacttgcccaacatgctgctgggcatggaggcggcaggaagtgccggaggcgtggtggaggctgccatctcatacacgggcgacgtggccgaccccagccgcaccaagtactcactgcagtactacatgggcttggccgaagagctggtgcgagctggcacccacatcctgtgcatcaaggacatggccgggctgctgaagcccacggcctgcaccatgctggtcagctccctccgggaccggttccccgacctcccactgcacatccacacccacgacacgtcaggggcaggcgtggcagccatgctggcctgtgcccaggctggagctgatgtggtggatgtggcagctgattccatgtctgggatgacttcacagcccagcatgggggccctggtggcctgtaccagagggactcccctggacacagaggtgcccatggagcgcgtgtttgactacagtgagtactgggagggggctcggggactgtacgcggccttcgactgcacggccaccatgaagtctggcaactcggacgtgtatgaaaatgagatcccagggggccagtacaccaacctgcacttccaggcccacagcatggggcttggctccaagttcaaggaggtcaagaaggcctatgtggaggccaaccagatgctgggcgatctcatcaaggtgacgccctcctccaagatcgtgggggacctggcccagtttatggtgcagaatggattgagccgggcagaggccgaagctcaggcggaagagctgtcctttccccgctccgtggtggagttcctgcagggctacatcggtgtcccccatggggggttccccgaaccctttcgctctaaggtactgaaggacctgccaagggtggaggggcggcctggagcctccctccctcccctggatctgcaggcactggagaaggagctggtagaccggcatggggaggaggtgacgccggaagatgtgctctcagcagctatgtaccccgatgtgtttgcccacttcaaggacttcactgccacctttggccccctggatagcctgaatactcgcctcttcctgcagggacccaagatcgcagaggagtttgaggtggagctggagcggggcaagacgctgcacatcaaagccctggccgtgagcgacctgaaccgggccggccagaggcaggtcttctttgagctcaatgggcagctgcggtccatcttggtcaaggacacccaggccatgaaggagatgcacttccaccccaaggccctaaaggacgtgaagggccagatcggggcgcccatgcctgggaaggtgatagacatcaaagtggtggcaggggccaaggtggccaagggccagcccctgtgtgtgctcagtgccatgaagatggagactgtggtgacctcacccatggagggtactgtccgcaaggttcatgtgaccaaggacatgacactggaaggtgacgacctcatcctggagatcgagtgatcttgccccagaccggcagcctggccatccccaagccttcaacagaagctgtgctgccacggcaggcccaggccagccagtgcccgaggccaggaaggccgggccgtggaggtcctgtccacagctggacaggagagacaccgcctgcggtggttcattcctttcagccatcgtcctttcctccggcggacagctgcttacatgttcatctcttgccaaataagggtcccctcctcactggagactacaagtggtgggtcaggtggtcctaggacccaggggaggtttaggggtcctatctcctgggggaaggggagatctaagatgtcccaggtcctgggaagtttactcaataaagctggctttcccctgc

SEQ ID NO: 7 - DNA, 494 bp, homo sapien
ccctcggtgctgcagggatctgcaggactgcagccatgggggcgcacctggtccggcgctacctgggcgatgcttcggtggagcccgaccccctgcagatgccaaccttcccgccagactacggcttccccgaacgcaaggagcgcgagatggtggccacacagcaggagatgatggacgcgagtgaggctcagctgcgggactactgcgcccaccacctcatccggctgctcaagtgcaagcgtgacagcttcccaagttgctggcctgcaagcaggaagcggcacgactcgggactactgcgcaccgcaagctatgtgatgcgcatgaaggagtttgagcgggacgagggctgctccagcggaagaagcggcgggagaagaaggcggcaaatctgcaaaggccagggacccggggaagtggaccccaaggtggccctgtaggggtgcaccccccaccctatggaccagtcaaataaaaccttcaggcccctc

SEQ ID NO: 8 - DNA, 216497 bp, homo sapien
gatcatgctgtacctgaaggccaacctacccatgacttcagttccatgggccaataaattcccatttttagttgaactgggttttctacaacttgtagctgctgaaaagtatctgatacagcccaaatcttgtattgaattgtaatccccagtatcagagatgggacctggtgggaggtggttggatcatgggggaggttttctcatgaatagtttaacatcatctccctgtactgtcctcacaatagtgacttctcgcaagagctggctggtttttttgtttttgtttgtttttgtttttttgaggtggaatcttgctctgtcacctggctggagtgcagtggtgcaatctcagctcactgcaacctctgcctcctgggttcaagtgattctcctgcctcagcttcccgagtagctggaactacagacatgtgccagcacacccagctaatttttgtatttttggtagagacggggtttcactatgttagccaggatgacctcgatctcttgacctcgtgatccacccacctcagcctcccaaagtgctgggattacaggcgtgagccaccatgcccagccaagagctggttgtttaaatgtgtgggacacctaactctctctccctcttgctcccactcttgccacatgatgcacctgctccccctttgccttctgccatgattgaaagcttcctggggcctccccagaagcagacgccactatgcttcctataaagactgcagaactctaagccaattgaacctcttttctttataaattacccagtcttaggtatttctttatagcaatgcaagaatggcctaattcagtatcctgacaaatataaacagtttcaacaatgtacccataagaaattcagttgactgtttttataaaggtctcataaccctactgttaccagtggagggtgtctaggatcttggtgttttgaatgaagaactggacaaaatgcacaaacaaagcaaggaaagaataaagcaacgaaagtacagatttattgaaaatgaaagtacactccagtgtggaagcagcctgagcaggggaaagcaaccaatcagaggttaaagtgaagttacaaagttgcacttctatgcacacgaagacttggccagcaatcagtctgattggttgcagacaacaaccaatcagaggttgaagtgaagttacaaaaattacactcctatgcaaacatatgattggttgaagaaagcaaccaatcagagatactttcaatttgccatttgccaggcagaaaaggtgtgggtttgcaaagggagtagcctctggtctttttgttacttaggcgtggaaagttggggttttccttttgatttagttctaggaagttagtgtgaattggccttaggttccctgcctccagaccctattctcctgcctcactacttgtgaggcgggaaattaaagaaagaaagaaaaataaaatttaaaaaggagaaataagctttcctgtattaggctgacttgccccagaggcagcaacaggcacagcccagacctaggaaaagtcttgatactatctaagaagccaggacacaaaggaatgtgccctggagattttcccagcactccctcaacatagggaggagaaaaacagattttcctttatcttacggtatgagtttatagattcctgttctctgtaactagtaacttgaagtattctcttttatctaagcagtggagtgaaggtcataaaccatctgagcaggcctgagatacagccacctggctgccatagtgaaggttatgggataagtctgtgctaggcactagaggaaatctagataacagacatctgggctgcatagcaatggtcatgtgtaatcctgagttatgaacctgtcacaacttgattaactgtctttgttctgcctctgtgtccttgcctttgtgccgctgtaagcctgcttctagctagcccaccccctttttgaagtgtgtatagaagtcaagtgctgtctttgttctgggcccagtttttggatgttaagtctgctgggtctgagtgcactcaataaagatcctcctgtatacaccccaaggtctctctggtcctcctgattcccacaacacttgttattatagtggattgtagaagagcaggaagtgggggttactcatcctccagctccatccatacttccacctctctccatagtttctgctagctgatcacctcaaggttatctgcccaaatgcaaatctgcagtgaagccccagagtctcctggctaagcatacaggtagggctaaagaacccacagtggaggacactggccaagaccagccagttttcttccaactgaaaggagccacagctaaacaaaagatagggaaacaaatccctatcttttggccagccctggcagaaagacagactttccatgggcagccgtgacagtttcctagctttggcatttctgcatgtccttaggtatgtcctccctaatcatatctatcaaccacctactgagacatcttcatttgtaaagtgatttattaattcagagagttcctgtgagcttcgagtgaaccctcacctgatcaatagaagttagacccagaatggcagaaaagcacggtgggagaggtcactgggatttggggcttggcttcaagttctggctctgctacttctgggctgtgttatttggggcagaatgcttactctttctgtgcaaggcagaatgatggcccactaaggatatccacgtcctaatccctggaacctgtgaacgtggcaagaggacctttgcagatgtggttaagggtaaggattttgagatgaggtgatgattctggattatccaagtgggtccaatctaatcatatgaatccttaaaagcagagaaatttcccagctgtggttgcagggagacacaactatggaagaaagttcagagagacacaacattgctgacttggaggctggaggaaggaagctagaaccggagggtgggtggtctctggaaattgaaaaaggcaaggagatggatttttcccccagagcctcctgaaaggaatgcagccctgccgaccttggattttagcccagtgagacacaagatgtgattctgacctccagaatgtaagataacaaatttagtagacctaaagaaagaagctgaggcaaaattaatatagagagtttatttgggccagtgttgaagacagcagcccaggacacacttccaagttgtctgggggagtgctccatccagcctttgttacaagcaggtttttaaagtggatacgcagttgtttgacaggcattctgactggattacagagatgacattgatccatgattggcaataccttgttgaatgatagagtaggagttatggtgtccagcatatggcattttatagctacttggcatcagtcagtctagaccccacacagcaagtggtttcaagaagtcattatctggctcaaagtgggagtgagacatggctgccatcacatgctgtcacacgtcagtgctctctgggctttagaaataagtgagctcacattcctcaaataaaaagtttcttttcagccaggcatggtggctaacacctgtaatctcagtactttgggaggccaaggcagaaggatcacttgaggccaggagttagggaacagcctgggcaaaaagtgaggccctgtttctattttttaaaaaaaattgttttaattagctgggtgtggtggtgcacacctgtggtcccagctacttgggaggctgaagcaggagaattgcttgagctcaggaggtcaaggctgcagggaactatgattgaaccactgcactccatcctgggcaacagagcaagaccctgtgtattaattcattctcacattgctataaagaaatacttgagactaggtaatttataaagaaaagagatttaattggctcacatttccacaggctgtatgggaagaatgatgctggcatctgcttggtttctggggaagcctcagaaaacttacaatcatgatggaaggtgaaggacaaacaggtacatcttacatggccaaagcaggagcaagaagagtgtgagtggtgggtgctattcattaaacaaccagatcttgtgaaaactcactatcatgagaacagtaccaaaggaatggtgctaaaccattcatgagaaactgcccccataatccaatcacctcccaccagcccgcacctccaacactggcagggacacagatccaaaccatatcattccacctcagcccttcccaaatctcatatccttcttacattgcaaaatacaattatgctttcccaacagtcttagcttattttagcattaacttgaaagtccaaaatccaagtctcttctgagagaaggctagtcccttctgcctatgagcctgtaaaatcaaaaacaagttagttacttccaagatataaggggggtataggtgttgggtaaatactcccattccaaaaaggaaaattggccaaaataaagtggttagaagccccttgaaactccaaagcccagcagggcagtcactaaatcttaaagctcaaaaataatcttttttttattccatgtcccacatccagggcatcctgatgcagggggtgggctcctaaggccttgggtagctccactcctgtggctttgcagggttcagcccctgcatctgctctcaagggctggcattgagtgcctgcggcttttctaggtacaaagtgcaagctgcccatggctccaccattccagggtctggagtttggtggccctcttctcacagctccactaggctgtgccccagttagggactcttcgtgggggctccaaccccacatttctcctctgcattgccctattagaggttctccgtaagagctccatccctgaagcaggcttctgcttggatatccaggcttttccatacattctctgaaatcttccaggcctcaactcttgcattctgtgcacctaccggcttaacaccacgtggaagccaccaagaattatggcttgcaccctctgaaacagtggcccaagctgtacctgggccccttttagccacagctggagctggagcagcagggatgcagggaacagtgttccaagctatcagcacttactttccttttagttatgcacatttctgcagccagcttgaattgctcccctgaaaataggcttttctttcctaccacatggccaggttgcaaattttccaaacttttacactctgcttccctttaaaatataagttccagtttcaggtcatttatttgctcacacatatgcacataggaatttagaagcagccaggtcacatcctgaacactgatgcttaggaatttcttccaccagataccctaaatcatcactctcaagttcgaagttccacagatccctaaagcaggggcacaatgcagccaggttatttgctaaagcatagcaagagtgacctttactccagttcccaataagttcctcatttccacctgagaccttctcagagtggtcttcattgtccataacaccatcaacactttggtcacaacaattcaacaagtctctaggaagttccaaattttctctcatcttcctgtcttcttctgagccctctacactcttccaacctctgcctgttatccagttccgaagctgcttccacattttcaagtatctttacagcaatgcccccctctttaataccaattgtcaggcctctgagtccaagctaagctatcatatgccctgtgacctgcacgtgtacatccagatggcctgaagcaactgaagacacacaaaagaagtgaaaatagccttaactgatgacattccaccattgtgatttgtttctgccccaccctaactgatcaatgtactttgtaatctcccccacccttaagaaggttctttgtaattctccccacccttgagaatgtactttgtgagatccaacccctgcctgcaaaacattgctcctaactccactgcctatcccacaacttataaaaactaatgataatcccatcaccctttgctgactcttttcggactcagcccgcctgcacccaggtgaaataaacagccttgttgctcacacaaagcctatttggtggtctcttcacatggacacatgagacaccaattttctgtattagtccattctcacattgctataaagaaatacatgagactaggtaacttataaagaaaagaagtttaattggctcatggctctgcaggctgtacaggaagcatgatgctggcatctgcttggcttctggggaagtctcagaaaacttaccatcttgatggaaggcaaatgggaagcaggcatgtcttcgaaggggatgcaggcacatcttgcatggccagggcaggagcaagaagagtgtgaggggggaggtgatacacacttttaaacaaccagatctcgcaataactaactctgtcacgagcacagcatgaagggaatggtgctaaaccattcatgagaaacagcccccatgatccagtcacctcccaccaggccccacctccaacattggcagttacaattccacatgagatttgggctgtgacacaaatccaaaccatatcaccctgtctcacaaatttctttttctttttaattaaaaataaagagttttggccaggcaaggtggctcacacctgtaattccagcactttgggaggccgaggcgggcagatcgtgaggtcaggagatcaagaccatcctggctaacatggtgaaaccccaactctacttaaaaaaaaaaatgcaaaaaattagccgggcgtggtggtgggtgcctatagccccagctactcaggaggctgaggcaggagaacggcgtgaacctgaaaggcggagcttgcagtgagctgagatcgtgccactctactccagcctgggggacagagcgagactctgtctcaaataaataaataaagaaaataagaagtttctgttatttatcaatttatattgtttagccaccagatttgctctaatttgttacagcatccaagaaaactaatacaaacactgagccttgtctccctcctctgtaaataggaggtgtagccctgacctccatggaatcatctgaaaactagaggctgtgagcttggtcctgaaatcacgaagtcctgggttcaaatataggattacagaggggccccactcttctcttgccaggccgggcaaggggctccgccctctgcctgccacaggaagcctgccccgtgcctcagcgaggaagcctgagttttaggttggtgcaaaaataattgcggttttgccattacttctaatagcaaaaactgcaattacttttgcaccagcctaatacttggccttgcacgtccccattccttctttcagacctttgaccttgagctgcctcaccctggccagggccaaagcagtaggattaagggagagtcttgggagagagcggaagaaacaagggcagggccccaggtcctgaccctgaggcaggtgcagcctgagcgttgggggagggatgagccctacagggcgcagctgcatgggcgccttctgcttctggctgtgggattcgcagaaaggcagctaacctccctgagcctgttactccacctggaaaacggggaagagaagttctagaaatagctcccattcctaggcatcctcctcttctctctttcttactccttccctttcttcgctattgttattattaatcatgagttttaccacgaccccataaggaaactgggagcttggagagcttaacttgtcaaagtcacggagcaggcaaacggctcaggtgggattcgaacccaaagcccatggtcgcacttctaggccaagctgccgcaaatgtgcaggatgcccgtgaccaccgacaaacacgggctcgctttggggagctagacctccgcgaagagggaggtggggcctttgggttatagggaggggccaccgcatgtccccagtccctcctgcaggtcacggagccaatgggctccggagtttctcccgcgcccgggcagcgcgtggagacctggcttgtgattggagctcgggggccaggggaggtggctcgggatgcgaacgcgcagtttagtgactaacgcgctcgcagcctgcgctaatcccggctattaccgcgctaatccctcgctgcaggctcactcccgggccgggccgggctgtcacgggtcagggcccggcggggcgcgcctttctcaccctgctcacgctacgaacttcacccctccccaacccccgggcccgagcgggaagggcctccggagttctcttggtccaggcccacgttcccatgtcacagatgggaaaaccgaggcccagcgggaaggaacttccccagggccagcagagctggacttctctatggccgccctgaacagccggctgcctgactgtcatcaccttgtcccctctggaataaaggaggtttttgaggacaaaactcgtgccctagcgctgtggccggggcctggaacatagtaggtgttgagttgtaaaggaatgaatctggccctttggagtcagcccagaacgccatattgaaatggtgaaaaggacaagactatggcctgaaggcaagtggagaagtgaggggtgaaatattctgcaaggtatagaatagacagtaaaatatgcctctgttatagaatatttgctggaaatacagctcctagtgttctttggagtccttttttctttctttctttttaacattttttgctatcactttgcaaaatggaaactcctatgaaacttccacatgaagcactgggctggcagtttgcttacgtatttcatttaatcctgtgagctagagatcacattgtccttgttttacaaatgaggaaactaaatggaatcagaagggttaagtcacttgcccaaggccctgcagctagaaatagatggagctgagatttgaacctcagtccacagagttttgttttgttttgttttgttttgttttgttttgtttcagccgaattgaactaaatgtctgcttagagctttcagactcgaggttctgtggctctgctgcaatatttaatatttttgaattgatctttttgaaaaaggccaaatctgctatgctatggttcttcagtctgttcccagcctctgtgcccaggcatcacaaagctaccaggagaaggcaccactctgatttcctagcctcctttggagtctgttcttttgcagaaaaatctcccctgaaatgtgcaagagttttcgcaccaaacagccacttgtctcattttaatagagtcccaaaattgacacttgggagaactgggtaatgcaactcagttccacagacctttcctgatattgtgtgacagatactgttctgggactggagacagagcaataaataagaccttgcatgctctgcccctcagattccccacgcgtacaaggttggagatggcagagatggcatgcagacccattctctccctttcattaatgtgcatgcaagcatgctcccttccagcactcatggcagatattgctcattgatcatggcacactttcctgctgaaacacatttcagcctcaagtacctaactcccaggattggttgaagccaggagttcaagaccagcctgggcaacatagtgagacctcgtctctacaaaagtaaaaaaattagcctggcgtactggtgcgcatctgtagtgatagctacttaggaagctgaggtgggaggatcacttgagcccaggagtttgaggttgcagtgagccatgatcaagccactgtactccaacctgggtgacagagtgaggcactgtttcttaaaacaaaactagcagtccccaagcaccaagggtagaggtgctagggaagatgaaatattttgtcctctccaaactaaggtagctcaggttctccctagctttgccattcagcccaatattctccaattctcccagggttccagccctgtggtttctctgctcctggaaaagatcctcccccatgatgagtgacactactgagacaagccagagagacatggggcagagcctccttctgcctcttcccttgtggtacaaaggaaggatgcttaacaagccccctgaagacctgttcctcccaggcagtgccttctagcagcactatctcctatcccttcctaaggaggctcagccctcctgcaatcaaacagcagccacctccccaggaccacattggctcaagacaaagtggggaaaggaaagaagtaatggaagtgttgggtcagccagacaagaatcccataggactgtggtttccccatatccattatgctgttatctccaagcctttgcatatgcagttccctctgctatgacagtaccccctgcacacacacgccccccaccccccaccttctccggccttgtctaacgaactcctattcagttcttcaaaccctagtcagatgacatctcctctgggaagtcttccttgccctccctctagacggtcacccacttcttcttgggtacatctgtgcctgtgcacacatttgtttcttgtagccactatagtgatttgtgtacttgtctctctccttctctggactgtaaactctttgaaggcagaaccatgtcttattctatcaggatcctcaccatcctggcacagacagggaactcactaaatatgtgtggacctgttgattaaaaccctaccacctgaaaagctgaaaacacaccaagctgatgagccaaagacaaacctcattatccccaatttgcaagtgactcagctcagccaaagagacatgccgaaaagtcatctgctcataccactggccaagtcagggcaagaacctaagagtccaagctcctcagcattccaaggaggggaaatggtccctccctttgatcctgcatatgagatggccaactctaagtgtccattaatgatttttcactgtttatattgcaaagctggaacacttcacccaggtggctacagctaggaacttacacgatcacagttaaaagtttgcaccatttatttcagcaaacaccttttacgaatcaaaagacaagggcagggatggtgcctcacgcctgtaatcccagcactttgggaggccgaggcaggtggatcacgaggtcaggagaccaagaccatcctggccaacatagtgaaaccccatctctactaaacatacaaaaattagttgggcatgttggcgccccagctactccggaggttgaggcaggagaatcgcttgaacccgggaggcagaggttgcagtgaaccgagatcgcgacactgcgctgcagcctggtgatagagcgagactccgtctcaaaaaaaaaaagaaagaaagaaagaaagaaaaagaaaagaaagaaagaatcaaaagacaaagtgttaatattcttaataaacaaggaaaccttatagataaatgagtagtaactcagtaggaaaataggtaaaagtcacaaagaggcaagccacataatgtaaaatcaattcaacaatgattcattgagccactactgcatacgaggcatggctctagacactggaggtacatgatgaacaagacaaggtccctgttctcatggaatggcctagtgaggcgaaacaggcaagcaaataaacatatatctctcctatggcaggtatatggagcaaagtaaaatagggtgatctgatagaggtgacacagctactctagaaggggtggtcaggaaaggtcttgcaaggaggtgctgataactgaatgccaagaatgggcagccatgcaatggccaggggggaaagccttccagaggagggaccggcaaagatagtgcaagatctccaagaaggagtgagccaggaatatttaagaagctaagaggaggccagcgtggctggagagaagtgggcaaggaggaaagtgtagagtacgggaccggctggagcgtgcgggactgtaagcgggggacagagttgagatttgagtgaggcaggaagacctgggagattttaagcaggagaagggtgtgatctggttacgttttcaaactatcactttggccactgtgtggagagtcgacaaaaatgagagcagaagcagggaatccagttaggaggcccctgaattagcccaagggagaattgacaaacacttggcataaagtggaaagggtggaggtggaggtgcaagcattcaggatgttttagggatagaaattgatgggatttgctaatcatggactggaattggggatgagaggaaactaagtctcaaggaaactgtgtatacatattttttgccttgaaaaattggtgggtagatggtggtacttcttcttaggtgggaaaatggcagaagatgggcaggagctggtttggagagaagtttcaaaataatagtaagagctcacatttaccaagtttttcctctgtgcctggcttgctttacatcagggagttctcaatctctacgttgttgctatttgagatgagatcattttttgctgtggagttgtcctatacattgtggggtgttaagcaacatctctggcccctacccactagacaccattagtgtgcatgcaagtatacatgtgtgagcgtacacacacacacacacacacagagagagagagagagaaagagagagagagagttggacaaccaaaaaatgtctccagacactgccaaaaggcccactcatcattcctggtgagaacactgctctacatggattctcttctgtaatcctcacaaccactctataaagtccatgctgatagtatccccattttacagatgtggaaactgaggcccagaatacttaacttatccaaagtcatgagtctttatttttggccaagttgggcttgagtgcccactgaccattgctacggtataaatgtgtctctctgaaattcatgttggaacctaagacccaatgtgatagtattaagagacgggaccttcaggatgggattagcatctttacaaaagggcttgagggagttgatttgccccttccaactcttctgtcatgtgaggacacagcaagaaagcaccatcttggaagcagacagcagtcctcaccagacactgaatcttctggcacctggatcttggactgcttggcctccagaactgtgagaggtaaagttctgttctttatatattacccagtctcaggtatttttgctacagcagcacaaacgcactaagacaaccattcatgaagagagctccaacaggcaggtgtgtgcatgccactgaggtgcaggggagtgtcagggtgaagagggaatctgcaattgggagtccctggtgcctggatgggactttcactgtggaactgaatgaggtcacctaaggagaatataccatcccctctcttcttttgaaaaacttcatttctcctgttatctctgctttctcttgcattaccagtttctctcttttccgaatcattcccataagcaaacatagagcgtcactgttccttggtgtcacctccccctccagtgcctgcccaatttctccactctctttcatagcaaaattccttaaagagttggtacaatccgtctcttcaaaatgtcacctctcattctctcctccacccactctaacaaagcattcatcccaacactcaactaagacctccaggccatcaaatccaatggtcactcctctgtccccatcttactggccctcttggcagctttggacacagttgtcctccctccttcttgaagcatcttctttccttggcttccatgacaccacactgtctcggctcctcctctaagtgtagaaggggcctagggtctggtcctagcccccttcgcttccctatttacatgaaagaaaaaatatggatggccagtacacattgaaaattgtgctcagctccaattataaccaaagaaatgcccactaagacaaatgagatctacttttaatctaacacgatagcaaagattcaaaagattaattatactcagtattggcatagatatagagaaacaaacactctcatttgccattggtgagaagataagtagtaccatctttttttagaaggctttttctcaatattgatcaagagacatataaaatagaatgatcaatcctatactttgttttaatcttttctattgacataatttcagacttacagaaaaactgcaacaataatacaaagaattcccagataccctacccatcatccacatcacctagattccccaaatatcatcttactacactaggattctccctctccctctctctctgtttctctctctcttcccaaaatatatatatatacactcacacatgtatgtatctgtgtgtgtatatatacacatatggatatatgtacatacatacacatacatatggatatatgtacatatgtatgcatacatacgtatatgtgtgtatatatacacacatgtgcatatataatagttttatacttttatactacatatgtatatatttttctgaaccacttagtggcaaattgcaggcatgatattctttaccataaatacttgagtgtatatttcctaaaagtatggaattatcttagataaccaaagtacaagaatcaaagtcaggaattaacactgatacaatactactatctaatccacagatctccttgggatctcaccaattgtcaacatggtgcccgttttagcaaaagtaaatccaatatcatatattgcctccaatcattatgtctctgtagtttcttttaatgtggaacagttcctcagttgtctgtttcatgactttgtcatttttggaatccaggcaagttattttatagaatgtccctgagtttgagtttggtagattcattctggcataaacacttttgtcttactcttccctctgcctggaatattggtttcttggcttttcaagctgctttcttctcctcctcctttgagtctcccttcaaatatcaccccttccaaagagccttcctactaaatagaattacagtcaattctcagaaaaaaaaaattggccaaatgatcaagaaatgtgatgttttagaccaggggtcggcaactaccgtgaatgaactaagaatggtttttacatttttttttaatggttggagaaaaaaaactgaaagaagaaaatcttgtgacattctcatgaaaattaaatgaaattcagttttagtgtccacaaataaagttttatggggacacagccaggcccgtgtgttacatttatctgggctgctttcctgctacaatggcagagctcagtagtaggcaccgagagtcactgctctcatctctttgtgtggctgctcagcacactacgaaccacatgccacagctccaagtcgacagcatgcacatcgctgtggggcagtattttctttttttataaccagtgcatacacgtcatgtcaaaacaagaagagtggacttccaatgttgtactttttaaaaatacatgataatcatgtggcaaaatacacgcaacataaaatttaccatcttctctatttttaactagatagctcagcagcgttcggtacattcacgtcattgtgcaaccatcaatgccatccgtctccagaactcttttcattttgaaaaactgaaaccctttacccattaaacaagaactccccattctcccctctcctccagccccaggcaactaccattccactgtcaaaaaataacatttcaatgaattgagttgactcattggcttttattattgattcattaattaggcagcatcccattgatgaaatagaaaaagacatcccaatgagaagagggggttgtctttgggggcacaaagtggcagaaggggaacagaaacaaggaacaaagagtagactgggcatttcaaagttacttttcttgtaggatgaaagcagaggggacttccttatcacatcagctcaggttgactgggaccttctctgctggttgctgtaaatctgtttgttttttttaaagctgactgttttaagggtcagtttgattacgtggcacctaacatgagtgactccactctggggtctagtacaggagcttagtccaaaacaatggcctccagtaaattttatttcaccctactttctgtctctatgattttgactagtctaagtacctcatagaagtagaattctatgatatctatcctttggtgactggcttatttcattgagcatgatgtcctcaaggttcatctacatcataccatgtgtcagaattcccttccttcctttcttttttttttttttttgagatagagtctcgctctgccccccaggctggagtgcaatgacacaatctcggctcactgcaacctccgcctgccaggttcatacgattctcgtgcctcagcctccgaagtagctggggttacaggtgtgtgacaccacacccagctaattttctgtctttttttttagtagagatggggtttcaccatgttggccaggctggtgtcaaactcctggcctcatgtgatccacccgcctcagcctcctgaagtgttggccactgcttccagccattccttcctttttaaggctgaataatattctatgtatgcatataccacattttgtttatctatttatccatcaatggtggagtgtcacatttttaaggcccagcgaagtgtgcattattttgttatccagttagatagcaagacattgtgcttattaggcaatgacactgcatctgtgccaaaagattttaatacatgtctcgctccataatatctaaaatatttactctctggctgtttatagaaaaagttggccaacccaattcttgttttaccctggcttcatagcagtcatggaactggacctgtagtcccacttagttgcatgccaacaaataccaactcaaatgctcaaacttttatctgaaactttgtgtgggcttccctgcaaatgcacttgactgtttcctcccagcttttcccgttcaaacctgactcagaaccacccctaacccccatctccacccacaagccaggcctgttgctatggtttgaatatttgtctcttccaaaactcatgttgaaatttaatccccaatgtggctgtactgagaggtggggcccttaagaggtgattgggtcatgagggctctgcccttatgaatgggttaatccagtcatggattagtgaattaatgggttaataggtaacccatcaattgatccattaagtgatcatgggagaggaactggtggctttataagaaaagcaagagagggctgagctagcctgtgagcactcagcttcttcaccagctgatgtcctgcaccactatgggactctgcagagagtcatcagcagcaagaaggacctcaccagatgcagccccttggcaatggacgtctcagcctccataactgtaagaaataaattcctttctttgtaaattatccagattcaggtattctgttataagaaacagaaaacagactaagacacctgtcctttcttgcccaaacagtctttctgtaaatacttcctgatgcctcttctgtacccagcccttgggaagttgacatgagaggcagggtgatacttatgcacccagacctgtccccctgccttccccacccacatgctcagcaccttcctgaaattaatcatagaatcttcagattacatgatctgaagtgctcagactctgcagaaggtgtgaattatacaagctctgagcttttaagttctcttaagctttttgtttctttttctttttttcctttttatttatttatttatttatttatttatttatttgagatagagtctcactccctctgttgcccaggctggagtgcagtgacatgaccttggctcactgcaacctccacctccccggttcaaacgactcacatgcctcaacctcccaagtaggtgggactacagccatgtgccaccatgcctggctaatttttgtttttttagtagagatgggttttcactatgttggccagcctggtcttgaactcctggcctcaagtgatccacccgcctcagcctcccaaagtgctgggattacaggcgtgagccaccgcacccagctctcctaagtcttttagtataagtttagaatggaagaaatgcaggaacttaggccctgaaaatgttagaattagggaatcttagggtgctaaattgttaaaatataaaaaccattaaaatggtggagttatttaaccagaatgtgttaaacttgcagattcttagaaccatggaaaatcagaatgtcctgggtggaggggatcttctagaagccaggaacacatgtcctatctggggcacaaatcccttctgacccccagcagccttcttctccctgcctgattcccgtccaagggtcttattgctcaggcatgctctgagcttcctagctgctgcgaccttgtcttctggccactggctgctgcccaaggtgcttcacagcccagccctattttccttccaccctctccatccactccttaaagacaccagaagccagacctgtcttcctgccttgctcccgtggtctcctctgcccagcttgcccttcccttcactcctcacctccccacctctccctgttgagaggctagccccttgtcaagggtctccccaaacatcacctgcacagggatgtgctcctgtgttcctgagtggctgtcacagccctcctttatcctcatgcctacaaatcacctcatgtctgcaaatcccttcaagtcttagagcctcagtctcagcttctgtcaaatgagaagaagaaaagtacgcccctcaacgggttgttgtgggaatgaaattcggtaacacagaaaatacttagcccagggcctgacacaggagaggtgctcagccaacatgagctaaagacctcaggaggcatgctggctccagagccctggctggttgcaccagatcagggcatccatgggcaaatgcagaaccaactgaatgagctgttgagcctcagcccaggaagaagggaagtgtgcacctggcagggaggtgcccatccaggacgaatccctgaaagaggatggattgcttctgccaggaactatttggatgatggaggaagatgagggtgagatgtggggaggggtcagcacgtgatttcatcccagcactggagtaagagacacatggtggtgggcggagtcaatcatcaagccagtgtcagtcattgagcccattgaggggttaagagctttgtcctgaaagtcaagaaaggaaaacaaggaaaagaaccatgcatttgttgagcacttactgtttgcctggtgctgtgctaaacacttgacgtgttctggtttggttcacaccaaagctagcatcgggactgaaagtgtaacagaagagccaggtagaccgggttcgaattccagctctaccttgtgctggctgtgtgaccttgggcaggtcgcttcccctctctgagcctcagtttcctcatctgtaacgtagggtagcaaaggaaaaaacttttccttctgtccttctaggttcttgattggagcccctgtaataaaaaacagattaacaaggaaaaagcacacaaatttatttaatataaattttacatgacacaggagacttcataagaaaatgaagacccacagaagcggttcgagctaagcctttttttgctgggttggatgaagggtggggagtcatgggaaaatgtgaaggacagaagaatttgagctaagggcagtgaactgggaacacccagcagggtggcttgtttggattcctctcggcattcctgtccctctatcttcagaggtgaagatgcttctttcctccaggtacagggagggctcctctcacctgaaggtcttgtgatctgcttcagaggaaagctcggagagtccttcctgcacccgccgtttctcaaattctttcagtttcaaatattcaatatccaaagcaccatattttggggtagtacattctgaatcctctcaacagggataataatattaggctaaaccaggtaaatttgtcaacatttgactctttggacctataataatggcagtttcacacagatctgtcctggaaagttttggggagaattacagtaattaatccatctaatctccttagctcagtgtctggcacatagtaagtgctccataggcagtagctcttcttatttatttatagtcctcatcctcatgtaatagattttaaaaactgatgctcagagaggttaggtaacttgtgcaaggccagccagctggcaggcggccgagcaagggttcaaacccagatgtgactgggcgctgtggctcgcgcctgtaatcccaacactttgggaggccaaggtgggtggatcacttgaggtcaggagtacttgaccagcctggccaaaatagtgaaaccccgtctctactaaaaaaatacaaaaactagctaggcgtggaggcgctcatctgtaatcccagctactcaggaggctgaggcatgagaatcgcttgaatctgggaggaggaggttgcagtgagccgagatcacaccactgcactccagcctgggcaacagagtgagactccatctcaaaaaaagagaaaaaaaaaagactaaatgcaagcccagtgccccaatctcctttctggaggggagcttcatctctgcagggcaggcagggtacagtgccgagtctgtgcagctcaggcccgccttcccctgctgcctaccagatcctgagggttggggctcgtgttaccctatttccattaaccattggctgggtcccccttcccctccagatcccttgcttcagggccctgacccacagccacctgagaggcacgtgacaatggtgagtgctgggttgccctgggagaggatggaggggtcactctgaagatccccacaggtggtggaaggatgacatgagattggggtcagagtcagagccggctacaagcttttctacagactcagcttcctttccaggcacaaagaacgtgactctgcctgtgcgtgggagactgggagagtgagcacgtgcgcgtgtgtgcgtatatctgtgcctatgcatactaggtgtgtgggtgtatgcacctgtgtgaggatgggtggatgcagggggactgggaggaggagagtgaggtatgcgtgcataggcgtgcctgtgtgtgcatgaggaccttgatggggatgcacccctctcgtgtatatttcatgcgtgtgttggtgttgtatgcggattgtatggggctaccgctggcagcttagtggaacatctggggcacagattctggagcggaaagcctagtctgcaccctggctcttcagcttgctggcaaagggtaccagccaccctaaaataggccactttggcacatggattattttgagctaaaggccgttgagaaccagccaccacaggaaaagctccttatctcctcctaactgcctaaaaattgagtgcagacaatccccaacttaccatggtccaatttggggtttttcggctgtgatgttgcattcagtacactcctggacttacaatgggttaactcagaataaacccatcataaatggaaaatattgtaagtcgaaaaggcaccatcataagtcatggagcagctgtacaaatagacccttttgtaagggaaatttccacgtgtaaagatgtctcatacgtgggagagagctgctcctggggagccctgctgtcacctgaggcttttctctgcagaacaagataactcttatttacctacatctcctcctgaccccttcccagaacagccctccccagcccagaaactcaaaaccccttttcctttgttgatatttaaaccccagtcccacccacccctttggttactgatcgctgggtgctctcatgtgtatacacaatgcacttattaatgaacttcggtttgtttttctcttgttcatctgtctttttcgagtctcccttatggggccccagccagaaagcctaaggtgggtggaggaaaaggatcatttcctcgctcatgccataggggaggcaagctctcctagaggggtgctagccaccccaaaatatgtctcttcggcacatagactattttgagctaaaggccattgagaaccagcacaaggtgctggagaaaggccacaaagagtatgtcagggaggccaccaggagctcatacttcctggagctcaacaggcttgaggcaggacatgctgtgtgtgggaattgtgtgggggtgggcggggggttgggaaggatggaggaagagattgtgtgtgcatggaggaggtgcatgggtgtgtgagtgtgtgcacaggtgttctgtgagtaggtgtagggggctgtgtgtgtgtatgtgcatgtgggtggggctgcacaggtgtgtggctgtgcaaagagatgttctatgagtaggtgtaggagtgtgtgtgtgcgtgtgcatctgtgtgtgcatgtgggtgcatggcgtgtgggtgagtgcacaggtgtgtgggtagataggagtgtgtgtgtgcgcgtgcgcatgcgggggtgctcaggtgtatgggtgtgtgtgtgcacaggtgtgtgggtaggtagggatgtgtgtatgtgtgagagtgtgtgtacatgtggggggtacagaggtgtgtaagtgtgtgtgcacaggtgttgtgtgggtaggtaggggtgtgtgcatatgtgtgtgtgcatgcgggggtgcacaggtgtgtgggtaggtagggatgtgtgtgtgtgcatgtgggggtgcacaggtgtgtgggcgtgtgtgcacaggtgttgtgtaggtagcccccaaggggtgtgtgtgtgtgtgtgtgcatgcatacatgtgtgtctgggccgggtgagagtgtcggcacatctgtgcacgcagtcagctccatcaaggctgaggttgaggctctgacccctcacaggacctctgggaatccaggccttgctgccagtcctcagctgcaggccaggcatccaccgcaagccctggctggggagcaaggtgagaaaaaagagaaattttgtatctgaggaatgtgagcccctttaaacgatcaggcccagagaggcactgaaatgtgacagcagccatgtctctctcctgccttgagctaaataatgacttcttgaagccacttgctatgtggactgactgacaccaggcagccataaaatgccatctggacaccatacttcataccctatcattcaacaatgcacagccaatcacagctcaatgtcatctctgcaacccagtgagaatgcctgtcaaacaactgtatctgcttcaaaaacctgctcgtaatgaaggctggacggagcactccccaaggcatcttagaagtgtgtcctgggtggccgggtgcagtggctcacacctgtaatcccagcactttgggaggctgaggcgggtgtatcgcgaggtcaggagatcgagaccatcctggctaacacggtgaaaccccgtctctactaaaaatacaaaaaaaaattagccgggcatggtcgtgggtgcctatagtcccagctactcgggaggctgaggcaggagaatggcatgaacccaggaggcagagcttgcagtgagcggagatcgtgccactgcactccagcctgggtgacagagcaagacttcatctaaaaaaaaaaaaaaaaagaagtgtgtcctgggctgctgtcctcaaccttggcccaaataaactctctatattaattttgcctcagtttctttatttcagtcaacaaaaggtgactccatgcagctcagccccacaggagaccccggggcccctgcttggagcccgtgagagcctgtgagggcaggaggtcgccctcctgatgccaagggaggacacatttctgcagcccacctgtgtgacctttgtgtcctctcttggacctccagaagccatgccctgagtgggcactgggattccacaggactcagggacgcactccacttggctgtggggccatctcaacctcaggacggtggggcagacagagtgtcagggctcagaggcaccgcagagcctcccgggccagggtctgcactggtcccaaccacacacagtaagacactggaaaaaccaactcaacaaatgtgtccaggttgtacctctatggggtaaaacccagtcagagcccaggcagcctcaagaagaaaattcagtgttgaactcagtaaagactcactctgatgtcttcatagatcgccaaggacaacccccccaaaaagggaggaccagtctgagccagaaatgccccagggggacacatgccctccagaggcagctggcttctcagtcacatccctgaccttgggaagagcctaaacctgcctccctgtagcactccctctgcaccagctgctaaacagggacctctctcaggttctgaaatcattcattcattcacagagtacctaccatgagctgggtccttcacagggcaccaagaacatagcaatgaacatgacagagacagactgaaccctcgtgggcttatggggtatttggggagaatgtggaacaggcaatcattgacataagtaaggttgccagataaacaacagagagctcagtcaaatgtgcatcttgaagaaacgatgaatgtcccatgcaatattttgaacctggaaaaattatttggtgtttacctgaaattcagatgtaactgggtgcctcatgtttttctttgcctacataagatattttcagctggtgacatagtctgaggaaaataatcgaggctagagagtgaaggagtggccagagaagccaaaacctgaatggaaaagaggcccccaccccggagtccacctccactcccccagctcattatcagtaaagagtgtggaactcactcattaccacgaggagggcaccaagcccttcttttcttttttttcttttttttgagacagggtctctgtcacccaggctggaatgcagtggtgtgatcataactcactacagcgtcgatctcctgggctcaagcaatcctcctgcctcagcctccagggtaggtgggcctacagcacaggtgtgcaccacccaatttctttagctgagtcctggttgcttaagctgtgactcactgtccccataaaaaccttagaaatgtccccaggaaccaaagtgaggagattccattggatgtcatttaaatacctgtagcagagtggtccccaagagataaaaagtctttgaacagaatccagaatagaatcaagcagtaaaaccatctgctggcgccatgcttctggtgagggcttcaagaaacttctaatcatggcagaatcaagaagcttccaatcatggcagaaggcgaatgggagcgggcatgtcacatggcaatagagtgagaactactcatgaccacaaggagggcacaaatcccttcataagggatctgtccccatgacccaaacacctcccactagcccccacttccaacactggggatcgcatttccacatgagatttggaaggaacaaatattcaaactggatcattgtgcccctggaccccaaatctcatgtccttcttatattgcaaaatacaatcaccccttcccaatagttcccaaaagtcttaacttgttctactgccaactcaaaagtccaaagttccatctaagacacaaggcaagtttctaccacctatgatcctataaaatgaaaaccaagttatttacttctaagatacaatgtggtacttgcattgggtaaagattcccattccaaaaggcaaaacgtggcgaaaacagaggggaacaggccactttgggaggccaaggcgggcagatcacctgaggtcaggagttcgagaccagcctgaccaacatggagaaaccccgtctctactaaaaaaaaaaaattcaaaaattagccgggcatggtggcgcatgcctgtaatcccagctgctcaggaggctgaggtaggagaattgcttgaacccaggaggtggaggttgcagtgagccaagattgtgccactgcactccagcatgggcaaaaagagcgaaactccatctcaaaaaaaaaaaaaaaaagaaaggggaacggccacatacaagtccaaaacccagcaaggcagacattaaatcttaaaactccaaaataatccccttgactccatatcctacatccagggcactctgccacaaggagtgggctcacaaggccttgggcagccccagccccatggctttgctgggtgggcacagcccacgtagctgctatcacaggttggagttgagcttttccaggctgagggtgcaagctgccagtggctctaccattctggagtctggagggcagtggccccattctcccagctgtgctaggcagtgcccttgtgggtactctctgtgggggctccaaccccacatttcccctcaccattgccttagtagagtctgtcttctggggctccatcccagcgccatatttctttttgtcttttttttttttttttgagacggagtctcactctgtcacccaggctggagagcagtggcacaatctcggctcactgcaacctccacctcccaggttcaagcaattctcctgcctcagactcctgagtagctggaattacaggcacccaccaccacacctggctaatttttgtatttttagtagagatggggtttcaccatgttggccaggctgctctcaaactcccgacctcaggtgatccacccacctcggcctcccaaagtgctgggactacaggcgtgagccactgcaccctgccaatgcttcttttcatttttatttttttcttgcttttagtattttgccaaggctgggtcatccaggcattacgcttcttatacagcttgcaggactatgagctgaataaacctcttttccttatcaattacccagcctcaggcattccttataatgcaaagtggactaaaacaccaattgaaaccaaacaagtggtgaagctacctgggagggtattacttagccccagatctgacttaagaaataggaaatgcatatgctgaaccctggggacacagactatgccaccaccctttttaggttatgggaaatcctgtttaaatgactaacaataggacttgtgtcctatcaagaccttggacaaaacctccatccaagcctgaagtttccgtggacattaaggaatcttagaggaggtaggaaccccaaaaatgggttggaaaactaagctcgaaattttcttggtgtgacaacatcattgccttagtaggctctcattttttaagcttgacaagaattgagcaaagaaatgtttcagagaatcaaacaatttcaactttggaatttgaaatatttttaatatttaagagaatatgggctatgttaagcttgtccaacccttggccagtggctttgaatgcagctgtagctttaaatgcggcccaacacaaattcgtaaactttcttaaaacattaagagattttttttcaattcttttttttttttttttttttttttagctcatcagctatcattagtgttagtgtattttatgtgtggcccaagacaattcttctccttccagcgtggcccagggaagccaaaagattgcacaccccagtctgtgtgaataaaaagtcagtcttaaggttttaatttaaatacacaaatgaggccgggcacagtggctcacgcctataatcccagcactttgggaggccgaggtgggcgtatcgcctgaagtcaggagttggagaccagcctggccaacatggtgaaatcctgtctctactaaaaatacaaaaattagccaggcgtggtagtggatgcctgtaatcccagctacttgggaggctgacaaaggagaatcgcttgaatctgggagatggaggttgcaatgagacgagatcatgccactgcactccagtctgggcgacagagcaagactccgtctcaaaaataaagtaaaatgcacaaatgaatcattgattgatttagacttgtgatattttaagttgaaattttactatgcttgacagaagtgttaaaaagttataaaaatttgaattcatgataagcataagttaccagatttctaagaataatttaagtgcttgagaaagttgtgtttgttattaaggcaactgaagtatttttaaaagaaattgaatatgttaaatctatacatgcagttaaaaatgtttaactgtgtgtcaacctgaaataaccaggagcgtcagagtctaatttaaaaagagtttaggccaggcacagtggctcacgccaataattccagcactttgggaagctgtgtggatcccttgagtccaggacttcgagaccagcctgggcaacgtagtgggacaccgtctctacaaaaaattttaaaaatcagccatgtgtggtggcccacacctgtagtcccagctactgaggctgaggtgggaggatcacttgagcccagaaggttgaggctgcagtgaactgtgattgtgccactgcactccagcctgggcaacagagcgagaccctgtctcaaaaaataataataaaaaaaaatgtaaaatacaccaaagtaaaataaaatagagtttattcaagcacaagatttgagaacggccacccagaaacctcaactccaaagtaatgaactcagcattccgaagtagggaagtgaagttttcatttatagaggcagggacagaggaatttttagccagataacaacatttttcatactaggctggcgcatagttacagccatttgactggttatgggcagtgtttcttttggcggagggcatatttcacattttttgtgaagggtatgatagctatgcgtttcctgtcatctgttctacgcagagcaggacaacaaaggggaagtagatgagtcacagggtcattaattaagaaggcaggagggttttgtccctgctgttctttaattctctctggtcattgtacagaataagaaaaataagaaagtgagttaatctacaatctgaggaataaaaggcacatgactcagatcccagtcacagctctctcaaggctgaagtgtgtcgggggttctgacagattttaaattatattttcatgcatgtttaattagccaagattgtcaatggaaccaaatattcagttgtatcattttaataattttataataatttttaaagtttttttttctttttgagacagagtctcgctctgtcgcccaggctggagtgcagtggtgcaatctccgctcactgaaacctctgcctcccggattcaagtgactctcctgcctcagcctcccaagtagctgggattacagtcatgcgccaccatgcccagctaatttttgtatttttagtagagacagagtttcaccatattggccaggctggtcttgaactcctgacctcaggtgatccacctgcctcggcctcccaaactgctgggattacaggcatgagccaccatgcctggcccactaaagttgttatattttaaaagaatacttttcctaaattttttcttaaatttttaatcgtggtaaaatatacataccatacaatgtgccatgtaagctatttgtaagtgttcagttcagcagagtgttaggtacgttcacattgttaaatgcagccaatctccaagactcttttcatcttgcaaaactagaattctacgcccactaaacgacaatttgccattcccctctctcttcagcccccagggcaacctcctttctactttctgtccctgtgaatctgactattgtaggtacctcattgaagtggaatcatataggccaggcacagtggctcatgcctgtaatcccagcactttgggaggctgaggtgggaggattgcttgagcctaggagttcaagaccagcctgggcaacatagtgagaccccatctctagcaaataaaagaaaaaagtggaatttgtccttaagagaagatttttaacttgaactcaaagctaaagtgggattgttgaatttgaaatgacagtaagtggaataataatttttgaaaaccaaaggagatcctttttttttttttttttgagacagggtctcactctgtcacccaggctggagtgcagtggccgacctcggctcactgcaacctctacctcccaggctcaagcaatcttcccacctcagcctccggagtagctgggaccacaggcacacgccaacacgcctggttaatttttttgcatttttggtagagacggggtttcaccatattgcccacgctggcctccaactcctgagctcaagcgatctgcctgcctccgcctcgacctcccaaaatagtgagattacagacataagccaccgtacccagcctactatcttttttttttttttttttgagacagagtctcgctctgttgcccaggctggagtgcagtggcatgatcttggctcactgcaggctcccgggttcacaccattctcctgcctcagcctccctagtagctgggactaccggcgcccgccaccacgctcagctaatttttttttgtatttttagtagagacggggtttcaccgtgttagccaggatggtctcgatctcctcacctcatgatccgcccacctcggcctcccaaagtgctgggattacaggcgtgagccactgcgcccagcccattatcttgtttaaacctcacaaccacctgggaaggaggtgccatgattaacccccatttcacagatgagaaaactgagactcaagtgagatgacttgtccaaggtctcctaagccaggaagggctaggatgtcaatccaggtggactgattctcgagatggaaaatgtgaccacatcatggggtatggcagaaatgattatagcgccttcttccaatgtggttgtaaatgactgcgtgatgttcttcctacacaagggtgtgtgtgtgtgcatgtgtgtgcatgcgtgcgtgtgtgtgtgcacgtgtatgtgcgtgtgtgcatgttgtgtgtgtgcatgtgtttgtgagcatccgtgcatgttttttgctcctgctaggttgctcataaggatggacctgtgtccccactcccacccgcacagcacctgactctgtgatttgtttatcaagtgatttttaaaacgaatcaacgacccaggctcacaggacaaaggcactgaggtaacaggacaggcctgaaggatgagacacaaaagacctccctcttttaccaactggctctgcgcccttcggccggtcactgcccctctctgggcccctctcatccttctctgagcttcagtcgcccctttgtccagcgagaagttcccactctaagggacctgccactgacctcacacaaaggtggcccctgaattctgacccaaaccaccaggaaaaagagggtcccaaaagctaaaggaaggtgctgagcagggtgggacagaggcggaggcattctgatctctcgggctcaggccggccagcgccgcctccctgcttccaagatggggatctggcgccaccttgtggtctccgcctcttgcggccttcgcgtgttccctgttttaactcttgctattaaccccactgctgccctctgggaactctgaagcaattccactctcttcaccaaatatttatctactgtgcccagctgtacccaggctcgacccagaaaaatcatgaacaagtccctgcctaaccatttagaggcgtctggatctgcaccacccatagaaaaatgatgcaaaccagccgggcgtagtggctcacgcctgtaatcccagcactttggaaggccgaggtgggcagattacttgaggtcaggagttcgagaccagcctggccaacatggtgaaaccctgtctctactaaaaatacaaaaatcagccgggcatggtggcgcgtgcctgtggtcccagctactccagaggctgaggcatgagaatcacttaaacccaggaggcggaggttgcagtgagaaaagctcatgccactgcattccagcctgggtgacagggcaagactctgtctcaaaaaaaaaaaaaaaaaaaaggaagaaagaaaaataaaaatgatggcaaccacaaatgtgtgcctcacaggtaaccacattttctagtagccacatttttaaaagctgaaataaataggtacaattaactttaacaatacgtctttgggctttttgatgtttgtttgtttgagacagagtcttgctctgtcgccccagctggcatgcagtggcacggtcactgctcacttgcagcctcaacctcgtgggctcaagagattcccccaaccttggcctcccaagtagctgggagtacagggggtgcatcaccatgcctggctaatttttaaatttttttgtagagacagggtcttgctatgttgcccaggctcatctcaaactcctgaatgttagtgatcctccctcctcagcctcccaaagtgttgggattacaggcttgagccaccacatccagctaataatacatttgcatttaatgaaatacattcaccatattatcattccaacatggagtcaattatttttaaaattaccatctttttctccttgtaactccttgaaatctgtattttacaccaggggtccccaacccccaggctatggaccattaccagtctgtggtctgttgggaaccaggcacaccgcaggaggtgagcattgggctagcaagggaagttttgtctttagattcccataggagcacaaatgctattgtgaactgcgcaggtgagagatctaggctgtgagctcctgatgagaatctaatgcctgatgacctgtcactgtctcccatcacccccagatgggaccatctagttgcaggaaaacaagctcagggcccccactgattctacattacggtgaattgtaaaattgtttccttatgtattacaatgtgatgatagaaataaagtgcacaagaaatgtaatgcgcttgaatcatcccgaaaccatccccacccccatccatggaaagcctgtcttccacaaaacaggtccctggtgccaaaaaggttggggaccactgttttacacctacagcatgtgtcagttcagattagccacataaaccttgtctggcagtggctacatgttggaaagcatgggtctaggacctcccaggcttactctggccccctggcagcccctcagacaactggcttattacatcttctccagaattcacctttctagctttgcttcactgactaagggtagaaccctggcccggacaagtcatcttacccttggatgtataaaataagggtaagaaaaatacttacttctggggttgtagcaaggattcaatgggataacatacacacagtgcttagcgcaggtgcctggcagggaataaatgctccataaatggtgacctaatgaatgaaagccttagcccatctttcagcatggtgatggttaattttctgtgtcgatttggccaggctatggcaccccatcatccagtcaaacatcagtctggatgttgctgtgaagatatttttcagatgtgatcaacgtttaaatcagtagactttgagtaaagtagattgcactccaaaatgtgggtgggcctcatccaatcagttgaaggccttaacaacaaagactgaggtttcccaaagaggaggcaattcagcctccagaatgcaacatagaaaccgtgctgtttccaacctgtagatttcagactcaagaccgcaacatcaattcttctcccatttctgactggccagctctacaaatttcaggcttgtcagcccccacaaccatgtgagccaatttcttaaaataaatctctctctctgcatatataaatgtacccccgagtggggtacagccacagcagcacgcagaagagacatgacttcctcattctgaactcacgcagtattagaacaatggagcaccccagcccttccccgcctctgagcacgatgtctctcaggaccgagagctgaggcagaggctgaatcaacgcccccatcccagagactcttctcaagggagtgagaccaaagggtgggctttgccaggggaaagggaatgtgacggggccaggcagggccagggttatggggatctgctcttgagggtatgactgcaggtccccatggtgcagagtcaggggttggggcgatccctggccacagaaggattgctttggggatccatggcccagaccccgacctcttcctttctctggtctcctgccagaattcctgtcaaatttagctgcctacagcagccagagtgattttcctaaagtgtacatcgtgccgttgacaccttccaaagtccttcccaggcttcccccatgaccccataaagataaagccccaaagccttttccacgacttacaatgctctgtgtgacctggccacagccagcccagcctctcacattgtggaagctttgaagtatgttatcaaacagcatgtagtcagaagcccatgtttacaaaaacttaaaataactatatacgcataggaaataactaccgtctactggaacttgggtctgtgccaggccacgatgtgcagtaccttactggatatcatcttgttattccttgttccttataacaattcctagtatctcctttatagaagaagaaactgaggcccagagaggcccccagctagtgaggggcagagccagacttgaccccaggtccaccaagaccaaagtccatgctcttcactgcaggctggttggtgcctctgtgcagatggaagataataatagctctcacctcacagggctgtcgtgaggattaaacaggctgagatgtgtgtgtgaatgggctctgaacagctcctggcatggcgcaagggctcaggaagtgtgctgccccacagcagcctgtgggcagcccggccagatcatactcatagattcagactgatctctggtactagggtcatgggtgatcatattttttttaacttttccacaatgaccaggtaatacttgtgcatttttttctttctttttaaattattgtatgtatagtgctctcagtaagctgtctgtttcctcaaagcaggcttgtcgaagtttgagtggcctccctggttcccccaaggcctggcccggagaccccacacccagtggaggaacctaacagaaaacagctcagaagagcccctcttagcccaggcaccctgcccacaggcttggcaggggcgcttgctggaggggtgggtgcgggtctgtgccaggaactggcctaagctaagtccccaaaagacaccgtgagatgctttgtggctcttccggatcccaggggagaggtgggagcaaccgtgatgcatgcgacctccggccctgaatccaccaacagctgtgactacttcagctattttaaacctctgggcaccaggaaactcctgtctcatcaaccaggctctgggcccaacatgatggcctgagcccgggcaggagtcctgagtgtgggtggccaggtctgaattgggtttttaaggggagggggcttcatttcttgagccttgtgccaggctctgtgctagtattttctgcaccttgttgtctcgtttaataccgtccttacaccgtgctgagggatcagttacttcacagaggcagaaaatggggctccgaatggcagggtacctggcccaaggcggcacaaaagcagagctgggcctagaactgcgacttccttatctacaaagcatggacagcattctgcccctgccctcactcggccttgccccctgcctccaccccagtggccctgcaagctcctccctctgccactcttaggagctctgcaacccagagtcaattcccccacctcctcacagctcactttcttcatctgtaaagtggcggagttactgggagggttcagtgatctaactctaatacatgaaaagagccgcttggaacagtgcctgacccacagaaagaaagcagtaagtgcccgctcttactccagctcccctgggtattgcggtctgatgttatcactatcttgcccagtgtcctgttatgagctgcccggggtctccgtcagtggggggtacagtgtcctcccccactctggccccagtctccccatgagtcaaatgaaagttagagccccaggaaggtgagaaccctggtgggtgcccgttatctgtcacacagtaagggctccaaagtcactcgtggcagaggggtgcccagacacgagctcacctctgggggcgcctcgaagtctctccaagctacacaagttttgtcccagtttggcaggtggccacccgagagattcctcctgattggaggatgtgctcagccgggtgcctggagttcatcagaagttactggcctcggccgggcgctgtggctcacgcctgtaatcctagcactttgggaggccgaggcaggtagatcacctgagatcaggagttcaaaaccagcctggccaacatggagaaaccccgtctctactaaaaatacaaaattagctgggtgtggtggtgcctgcctgtaatcccagctacttgggaggctgaggcaggagaatcaattaaacctgggaggcggaggttgcaatgagctgagatggcgccattgtactccagcctgggtaacaagaggaaaactctgtctcaaaaaaaaaaaaaaaaaacagttactggcctctccctgggtctgtgagctgtgcctttgggggacaaatgacctcctggctaaaactcgggccttccctcttccccactcacattcctcccaaatccctgccactcagaagcagctgggctcttcaccacctcctaatttgggccgcctcagggagaaggttggagtccaagggctgggtatatcagcactgggcacttgtgggcctcacccctcttgtctgggggcacccgttcctggagctccatcttccatcagctctaactccttcccaaacacacatcccctccgccccactccttccctcccacggcctctgcccaccccccctcagtttctgtcctcacctaccaaagaccacttcctcacacagggctgatgtatgtgtctgaacagcactcccactgggtcccaggggaagggctgggacatgggaggggctggccgaggcccacactgattgtcatcctacatctcagcctctgtgagacacacgatgacctctgggtggcaccccccttcccttggtggcccaggccagaaccggggccctaatccttacccctctcctctccctccacccacacatcctatcagtcaccaggtgccaccaaaatcccagtccctaagcagtggccgggtcagtccccacctctccagctctggccacagccaggggcttccttgcccctccccagcccagaatgacccatttcacgagcacacccgaccacggctcgcggagacaaccactccaggctcccatctcccaccctccaatgccttggcttggcgtcctggtctccctcagctgccgggttccccatccccaccgcttcccgttttctctatggtgaggttcatctgactgttgggggatgggggtaccgggctgcacccggctttgcacaggcagctccctctcctcgcctttaatttgcaaacgcctcctttaagaaggttccaggatcgtcttctctgggaaggcttcctggcccccaggctgggttagggcaccctctttgtgttcccacatttgcattttcagccccactgggctggggcgtccggaggggagctagggccctccaacacctgggcgcccaccgaaggtttgtcgaatgaaagaatgacaatccaaccatggaaagcacaaaactggtccctgatgacttcgccacgacctcagcggggcgggacgagttaggggcgggaccacgcttgacggacaggcccgcagcccactgcgagaggactggggcgggccgccccgcccaccggccgctggataaggctgcgcgcggggccgtggggcgcaggctgctggagaaggcgcacctgctgcaggtgctcccggccgccccggaccagcgagcgcgggcactgcggcggggaggatgctgcgcgagcggaccgtgcggctgcagtacgggagccgcgtggaggcggtgtacgtgctgggcacctacctctggaccgatgtctacaggtgagccggcccaccgtgatgcccgggccgagatctcgagcccagaaatcctgagacgcgctcagactcggggacgtggacagcctttgtccagcccgagttgtccctcatcccgagcccccgagcccagaaatcctaagaatctcatccagaaacctgacaacccccgaaccttgtgtccaccttccagaaaccctgagactctcccagaccccctaacacagcctcagccccagctccctcacagaccctccctttcacccgtaaccctccgtctggccctctccagttctcctcccgggggacctcacaccccttcagcttccctgccgtcctctcccctttcacttcccctccgcacctcacttcccctcggacccacctcaacccagcccctctcctgcttcccactcccagttcagcggagcttccgcggagacttgccggggactggggcaggacccgaagggagctgccctgaggctgaatccggccctggaggttactcaggctccgatttcgccctgtgggggctgctggtggttgcttgtccccaggcactggccctgagctccgtgtccccagataccttcccctgacttcattctgagaccacagagggacaatattctacccagctgacgacggggacttggggtgtatagcggggtactttgttggaaaaggatcctgattcagagttctgctccctccccttctctctgtccaagaacttggtagagtgcgggatgtccgagacagctgaaggtagggtagggccctaccactccccccgcaatcccagaaagcagccaagtccaatgatctgtctccctgagtaatgggacggggccttggaaaggtgtggctggtgtgaatgaaagggtggggttatgctggggtttgatctgccccctctattccaagcatttaaaacctccccattgctagggttggaggggtcagtgctgggggcagggagcatgcaggactctgaggtgggaccctgtgctgacaccggatgagtcccctatcctctctgcctcaagctgaactcacacggaggcaccatcgtggtttatggctctcaaatcatcctgacacctggagcaccctgcctctcccaggcccccaccaacccatcatgtgtctccccacacagccctggcagccctcccacctgcccaaccagtctcctgccaccgctgcagaggcactggccacgctgataccaacaagccccaggactagggacccactccatgcctctgtccctggcctcaacctctgccttcccctgggcctgggcttcagttgtcccccatgtaaacctcagaggtggactgggtggtctctgagaacaagaacacagcagtggagggtggtccaggctctggtggggtgcaagagctcccctgccttccccacccccagccctgaactgggcaccgctagggagtgggcgcggagccagagtgctcaggtctctaagcctcagctgtcaccatacccacctgtttatttgctggggcatggttggtgccgcctgaaaagctggcatgatcctcccagtcgggggtggggagcaaaggagggttcctgctcaggcgccctgctatcgctctatcctggcaaagagaggcccagctggggtaggggcacagagtggggcagatatggactcagcctccctctagcagggggcagcagtgtgacgattccccttgtcctgtctcaacgaccacaaagaccctaacccccaccggcacttaaggttctccaccaccacagagaggggcagtgcgctctagaccagtactgtccagaaaagtccagtttgaaccacaacaaaaccacaattgcattttaaatcttctagtagtccacacttttttaaagttaaaacaacaggcataattttaataatatattttgtttaacccaatattttagaatattatcatttcaacatgcaatcaatataaaaattattaaggaaatggtttaccttccttttttcatgctaagtctttgtaatccagtgcacattttacacttcagcacatctcagcgtagattgagtgcatctcaggtgctcactggccaccgtgagccagtgacaccgggacagaacaggtctagtgcagagtttctcaatctcgcactattgcattttgggctcgatatttctttgttgtagcgggatgtttagtggcatccctgacctctgtcccctagatgccagtagcaacccccaaattgtgacaaccaaaaatgttgccagacagtgccagcagtcccctggcagggggcaaaatcacagccagctgagactcactggtccagtggaaggaagcctcttccaggactaaggagcttgagttgttactgctattgtgactcgagttacctgtagtaatgagagcaactgccagtattgataacaggaggaggtattagtgggcacttaggaactgaacccaccacctcctttcttcctcaccatagaccctggagggttcattgatcatcccattttacagatgaggaaggtaaggctcagagagatgaagccatttgtccagagtcacacaggactcaggtccaggtctgtttgactcagaactcatgctcttataccccactctgtcctatgtgaccctaaaaccagcgggttgaactggacggccctctcagcctgtgtctcttccaccctggccacgagcccactgtccccagagacttcaccaactcccatttggccctccactcttccctgagtcctttgctgcccggacacaggtcctggctcaagaccccaagtgatgcccccagagcctccaagtagaccccaaggaacaaggcccgggggtgctgggcccagttaattacggagtggcatcctgaccctcactccttctgagtcgcaaaggtgagcgaaacggcctcagcacccactccctttcccaagggctctggactccctttcctgtgatgctggcacacaggatcccctccagacacatagcaggggcctccccagcctcattcctcaatagaccttgtggtcctggcaggcactgccctaccagcttccatccacgggctgtgtgaccttgagcaaatcgcttcacttctctgagtctccactgacccaaatgggggtcgatcagagaacaggaggaaggatcttgtattcaatagaagatgtacactcagggtcacagtgatgaacaattgaccactatgctgccctatgaggggtcatccaggccaccatgggcaggggtgctctgggccacccacgctctcccagcaaaactggcccccctggggatggatgccttgacctagcctcattctgactgctagtctccagcaagcaatgaatagatacatagaaagaaggaagtagggtgtttgttagaaattgtactttgtgattgttgttaaagatactcgctgtttccttctgctcttcccaaatatactcatcttagtcttggcacaggtacacctggcccacacaatctcctccggtggtccctttagccgacagtcacttcttcagtggggctggcctgggtccccatctgatttgggcttgaagttggaaagagagcacagagggagtccctaggttggttccatcctggccacccacctcttgtgagccctggaggcatggacactcccagagtctggaaggattattagggacagggcagcctcggagtaaagtaggtagcagggtggtcactctctgcccacaagctgggccttgggaatggcttcttctgttcctccctcggcttatgcctctgtcagtgagagttctcgagaaggcagggctcttcttttcctccctggtgtacaggagccaggatccagatcctgaggtctgcaggagcttcaggacactggaatgatcttaacattgtccctttgcctgtgcagaggttccagctgcgtctgtgaggtggaggtgggaggattcccttccctgggattccccaaggcagaggctgaccagccattgtcccagtagaagacagaaagaagataaatgtcagctagtaatatcaagtaaatagtaataatttgcccataactcgctggcagaagataggaagaaggtatcaggcaggcgctcctagactttggcacaaactcactcccagactttctgtctcttggttggtgtgaaggctagagatgtatttgcttttttaaaaagtgtcattaggacaaaggccaggagggtctgagatccagttttccatgatgggggcctggggtgctatgggctcccctccccatagtgtgccaggccctacctcactgatctcctcttctagcaattcctcagcacacactccattccggccacgctggctttgtggatgctgttagcccttggctgtgccaagctcattcccacctcagggcctttgcagttgctgttccctctgcctggaacaccatcccccagatccccacaagcctgactttcatcagtcaagtctcagctccaatgtcacctcctccaggaagctttctttgactaccccatgtcgtggtgccctaccctgagtcccgagaactctgtttcatcacatttttttctttgcacaacttctcatcgtttcttaatgttactagttgacatttattgaacacttattttgtgcaggcttctcaacactttgcatgctcatctcacggacatgtaataatttacgtatttaaaccttgcaacaactttatgagttaggtacaattattgtccccttttcgcagctggggaaactgaaggaaggagtgtttgtccaggatggcacagccagtaaactgtggggtgcagagcccaggcccctgcctgctctgccaggctgccctcctggtacttatgtttcaggcgtgcctcctccttgtttgtgatcctccctggagtcaatgaagggctccctgaatgaatgaatgaatgaacgaatgaatgaatgaatgtggcctgtgatgcctgtggactggcctgtcatggggctgagctccccacccccagcctcaagggacaggcaccgttggatgggcctgtggaaggtcaagggcatgtggccaagcttggcccgagcagcgcttgctcctgagagaatgacggtgggaggaattcaggccaggtcaggtggcccataaattagaacagcacccagagccctcaaccccaaacgggatgccttgccaggaattgctccagggctctggtttcaggctagtttcctggggttgggagtgttctaaggagaaccaggctcacagtccctgcatagttggggtccctgagaccttccctcattgactgcagggccctgagttgggatgggagcacagtggcaggggctcaccccagtgcccacccctagctggccagacatacctgctgcactttggaggaggcagcttttgaaggcagctctttcctgcccagccacgccagaccttgcacccagaggctttgatgggcccaggcttgcttctctctgtcattgacccaagagcccaggacaggaagccagtctttagtgtcccttctctgtgtctcagactcccacctgtgaaataagtaaggggctctcatttggtcctcttcagagccaggcctgatcctcccctctgccccacaccaggcacacctacctgggggatctcaggaaagactccagactttgaattctctcccagggaggggacagccaggcccaggtctcagagagcctgagttcccctcacactcggccatgactgtccctgagatttgaagcgggtgcttgccctctaggggcctcaatgtgctcatctgtaaaatgaaatcacagtggtatgggcctcatggggttatcgaaagaatgggctgaggtcatgtgggccatgggcttggtacagtgcctgagacataatgaatactcagttccctggtggtctagtggttagaaaaataataataataataataataataataataataatagtaaatactcagtaagttgttatgtattagtattgagtttattttgaaaacaagtaataatgagacctgatccctctcctcaaagacttcatagcacttatgggaaagaaatctagaactgaatttattaagtgttgtttgagacaccaataaatggagggagagatatattctggctgatgagatcagggatgacttcctggaagaggtggcaactgagctgggtcttgaaggatggactggggttcagagtgagaccaagaacatgccactcaggggcagagataactggcagggaagttggggcacacagagacagaaagggcacagcttcagaggcctggagtataaggctggagggtcaatgagctctaaccaggctttgaatacatcgttcagacattggactttgttctgtaagtagcagggagtcactgaaggtttctgaggagaggagtagctatagatcagattgtttcttccctaaggagaggcccgggacagctggatgcaccaggtggtgagggaagctggctgaaggcagacgtcattgtttgcctccactgatccctgttcagggcagctgcccacccacagggccccagccaccaccatgccgagcaccaggtgtgaggtctggactgaggtcattctccccgctggtccttgcctgcctcttgctcgccatggggttgcatgacaggctggcacccacgactcccccccccagactcctctaaagccccaagagcaggatgtcacacccaggctgccaggagctggggtcactctggggatgagccccagctggtgttaatgaggcccaggccaggcgggcaagctaagaaagccagatgccagcaaggagcaggcgcttcatgccctcaagtctggggctggtgagccaccccagccctgcaaggccaagccagtgaccctccccactgaccgagccaagaccagagaggaccatggctcctagagaccacaaagcatttgtgggactgggcaagtgtcgtttgtttgacaccaacctagtggccatttctctccatttccacagccactatctggtcccaagacaccataatcgctcacgtgggcagctgcagccacctcctccccacttcctctgttgctttcctgaaatccatcccccaccctgcattctgggcaaccctgcaccctggatgatctatctacagtgcaaaactgatcatgccacccctgcttagaaaccttcagtgacttccctctacaatcagaggaaggccagctcctcaccattatctaaaatccctgctcccaccactctccctcccccttgctcacaaactccagacacactcccctctttccagcttctcgaacatgcaggactaacccccacctcaggccatcacgcaagctgtcctgttgcttggaaatctctgctcctcttcctctccttccttgtccaactcagtggttgtcaaactgtgggggaccagcagcatcaacattacctgggagcttgttagaaatgcagtttctcaggtcccaccccacagtcgatagatcagaaactcaggggctgggcccatttacctgtattttagtaggccctgtaggtagtggtaatgcacactcaaatttaagaatctctggtttaattttttttttttacagtcagcactgcaatggtgtaattaattcctgcctgtcctttagattataaagtttaaaccttagttcaaatgccacttcctcagggaatccctccttgaaccccagactggggcctcatggcaccctctcctcctttatagtaattatcacagctgtaatcatgtaatccattgaaagtctgtcttttctgtccaggcacagtagctcacacctgtaatcccagcactttgggaggctgaggcgggcagatcacttgaagtcaggagtcccaaaccagcctggacaacatggtgaaaccccgtctctactaaaaaatacaaaaattaaaaatagccaggcgtggtggtgggctcctataatcccggctactcaggaggctgaggcaggagaatcgcttgaacccaggaggtagagattgcagtgagccaagatcatgccactgcactccagcctgggcaacagaggaagactccgtcccaaaaaaaaaaaaaaaaaaaaaaaggtctgtcttttccatgggcccagggaatgtgtttgctttttcactaatctacccctcaatgcctagaactgtgcctggcacattgtaagtgctcagtaaatacatgttgagtgaatgaacgaccatataagtaagcccgcctcctccagccctcctgcagcaaacatttatacttacggtgtgcccatactaggccaggtgctgaaacaaacaaacaaacaaacaagaagatccaatccctaccttcaaggagtgaactgccaaaagggccagtaactgtgggggcaaatggatggagttaggtcttcaaggagagatggacatttgccaggcagagaagtcaggggaaagtcttgctggtaaaaggaacaacatatgtcaaaatgcacagtagatggaacaatgcagggagctgaagtggtggaaggaaccgcagaaaatgaaaccagagagtcaagctgagttgcaatggccaaatgtgcctagttcaacaccaggatgaagagtttggatattcttgtatgggtaggcactgaggagccagtgaatattttcaagaaagcccatgacctgatttctgggttttttttgtttgttcgtttgttttttaaatcacttgtgtaatacagcttggaaagccaagaagggcaggtgcattcattcatgtattgccaaagactacactgagcatatccatgtcctgggttctgggattccatggtaggcaggagacatggccacagtgattggcagcctgtccctccatccatgctctccttagcctctctctaataagcaagaaggtcataaccacccccaagccccctccctttccctcaatactgtcctgggcccctccctgcagcctccagggacaatccaggtgcctgaagcccctggctctcgggtttctgcgagagagattctaaagggttcttcctgaggaggaaggcagccaacaggatctgcaggggcacaatgggcccctttattgctttgcccagggccactccaagaatagctgtttgctcagctcagaacagggctggtgctggggaataggagggtgtggggccctggagctgcgatgtgggctgggcgttaaccctctggagcctctgaggcctcctttggtttctctctggtccagaggaatgaaggtgggcaggaagcatcacttacagtaactgagtcagggtcctaaaagatcatcttgtaaaacattttttcctaaatagaattgtgtgcagaagctcaatatataaaaccagatgaaataatagtggctctgggtcaggcatggtggctcactcctgtaatcccagcactttgggaggccaaggcgaacggatcacttgaggtcagaaattcaagaccagccaggccaacacagtgcaaccccatctctactaaaaatacaaaatttagccaggcatggtggtgcatgcctgtagtcccaactacttgggaggctgaggcaggagaatcacttgaacctaggatgcggaggttgcagtgagcagagatagcaccactgcactccagcctggatgacagagcacgactctcagtttaagaaaataaataaataaacaatagtagtagtagtggctctggttaaggtggggaggggagtggcaggaatccagtggagatatcccaagctttttttttttttttttttttttttttaatagacagagtctcgctctgtcacccaggctggagttcagtggcacaatctcaactcactgcaacctccacctcccaggttcaagtgattctcctgcctcagcctcccgagtagctgggactacaggcacacgccactacgctcggctaatttttgtattttttttagtagagatagggttttgccatgttggccaggctggtcttgaacttctgacctcaagtgatccacccacctcagcctcccaaagtgctggggttacaggtgtgagccaccgcacccagccatccccagctttccagagccttcctcctcacccctttgcccagggcctctcctctgcactctctggactcagccacctctgctctggttccatcctctcacctaacactggatgaaactgagagagggaaagtccctggcccaaggccacccagcatgttgatgggcaaagctgagacttgcaggagaggaatgcttcccagacctgaggccatagtttcccagactctcatggctttggccaaaaccatcttcaacctgtctcactataacacttttctttaacccagctcacatttttcttaataactttattttaaacagagattttatagcattaccataaatggcaagactttatcagtcaccataaaaagatactgtgtttgataaacacataagtcttcttgtagattgttcctccctgtgccacctaaagcatccagggtgtgtactcacacctctccttgggaacggcttaccttccgtccgactcacctctgccctctttgcttgggtgtatgatgggccaagccctgtgctaggctctgaagaatgaagatgggagaggccggaccatgccctcaggggacttataacccaaaggagggcaggtaccacgtggcaacaccactcagcaaaacgtggccccagccctagggggagtgagagacgagagctatgggcaggagggtggcagtcctcctgaggcgtagggactaacagatggacattcagaaggtgcagaccccctcaagtcaggggcaaaactagactcaaacccaggtcctctgcacgtgcacccttagtccagggcttttgtccagactctgtgcccctcttaatgatggatgtggccaggcacggtggctcacgcctgtaatcccaacactttgggaggccgaggcgggtggatcacctgaggtcaggagttcaagaccagcctggccaacatggtgaaaccccaactctactaaaaatacaaaaattagccgggcatggtggcgggcacctgtaatcccagctactccagaggctgaggcaggagaatcgcttgaaccaaggagacagagtttgcaataagctgagatcacgccactacactctagcctgagtgacagagagagactcctcctcaaaaaaaaaaaaaaaaagtgatggatgcggagaggggacagcaagccatgaccaagaagtgtccagtctcacatcatcccaggacaggctgtggagtttggaagggggcaggacaagaaccagagtgaccttggggtgtcttcattgagctcctctcccagcactggccacaggctgccgagtccttcccaattctcctgccagagcccaagaccagtagtctttgcccatagcccctgaagtctgtggcccaggtcagacagacactgcccggcagcctctacagattcacgctcacggccttggccagcccagggctctcagcagtggaccgcagtgctgattgtctggaccagtggttctcaaagtgtggtactgggaccggcagcatcaacagttcctggaagcatgttagaaatgcagattcttgggccccatgccagacctcctgaattggatgctctgagatggggccccgcagtctgttttgacaagacctccaggtgccgccgccccagacactgctgctgcactttgacagccgctggcctacacttgtcattcaaccctggccactgtttccatcttcagctgccccagcaccctcagcctctgccatgccagccagcctctccagagactggatctacaaatctacagccttcaaagaaaaacaccctatagatttaaacagcacccctgatgattctgatgcctgccatagttgagaactcctggaacccaagagcaccaggcccccaaaatagcagctgtgcctttgagacaggcttacacctatgtcttagtcacaaatcccacgagaatcccacctaagtccctctgagccctcttgggcctccagaccagtggctggatttagcaaagccgccagccctaggcaccttcctcccttagtcccctgtccttcctgtcacctctccttaagccaacaacaaaacaccatggacagggtggcttaaaaacaaattcatcttctcacaattctggaggctggaagtccgagatcagggtggtggcatggtcggggttctggtgacggctttcttcctggcctgcaaatggccaccttgtcactgcgtcctcacaagatctttcctcagtccatggagagagatctctatctacctatccctccctctcttgctgctcctcctcctcctcctcctctctcatctttcttctcctatttgattagaagcctgcccttggccagggtggctcacgcctgtaatcccagcactttgggaggctgaggtgggtggatcacctgaggtcaggagtttgagcccagcctggccaacatggcgaaaccccatctctactaaaaatacaaaaattagctgggtgtggtggtgtgcacctgtaatcccagctactcagaaggctgaggtaggagaacagcttgaacccgggaggcagaggttgcaatgagctgagattgcaccactgcactccagcctgggagacagtgagactccatctcaaaaaaaaaaaaaagaagaagaaaaagaagcctgcccctatgacctcacctaaccttaattacctcctaaaagctctatctccaaataccatgacactgagggtgaaggcttcagcatgctaatttggggagagacaaacattcagtacacagcagccagatcacatccatttgttctcctgctctgaaatactttcggagttcttgaatttcggaattcaagaattccaaaagtatttgctttgcaatggaaaaccacttttgaaccccaagaaatgactcagaaggtgggggatgtcaggtggcaagaaagctgtggcaggaaggaagggatctttgtaacaagagacaccccacctctgccctgttaggacccaggcactgggctccatccctgtgaggactcagcactttactcagcgaccctgggcagggagacagggttccaggcccagctctgctagtggagcaaattcattcctgcctgggtctccatcttccaccttcacaggaccctgtggctcccaaaactggcctcccatcagaggcactaggaaggttgttaagaattcagatccccaggcccgaccctcatacattcacactcaggaggtgcaagattggcccaagagatttcatgttcaacagatgtcctcttcacagccaggtgactgcaatgcagctggcccctttggggtctcccagatcagattacctgtgggggcccttgcagacttgcccctccagaagtcttcttttttgaaaaaagagccgggcgtggtggctcacacctgtaatcccagcactttgggaggccaaggcaggcggatcacctgaggtcgggagttcaaaaccaacctgaccaacatggagaaaccccatctctactaaaaacacaaaattagccagctgtggtggtgcatgcctgtatcccagctattcagaaggctgaggcaggagaatcgcttgaacctgggaggcagaggttgcagtgagccgagattgtgccattgcactccagcctgggcaacaagagtgaaactctgcctcacacacacacacacaaaaaagaagagacagggtcttgctctgttgctcaggctggagtgcagtggcacaatcatagctcactgcagcctcaacctcccaggcttaagcaattctcccacctcagtctcctaagtagttgggaccacaggtgtgcaccagcatgcccagctaattttttaatgtatataaagacaaggtctcactgttgtccaggctggtctcaaacgcctgggctcaagtgattctcgggctttgacctcccaaagtgctggaagcaggagtctcctcttgaagcccctcatcccacctaccccagggctctccctaaccctctctcatctctccccacagcgcggccccagccggggcccaaaccttcagcctgaagcactcggaacacgtgtgggtggaggtggtgcgtgatggggaggctgaggaggtggccaccaatggcaagcagcgctggcttctctcgcccagcaccaccctgcgggtcaccatgagccaggcgagcaccgaggccagcagtgacaaggtaccacggcgggaagtccagcctctgcgggcccgggaccatgccaggatagaggcagggtggaccagccctgtcccatagaaactgcacgtgggccatgtgtcattttcagttctgcagtaaccacattgaaaaggcaaaaagaggccgggcgcagtagctcaagcctgtaatcccagcactttgggaggccgaggcgggtggatcacaaggtcaggagatcgagaccatcctggctaacacggtgaaaccctgtctctactaaaaatacaaaagattagccaggcatggggcgggtgcctgtagacccagctacttgggaggctgaggcaggagaatggcgtgaacccgggaggcggagcttgcagtgagccgagatcgcaccactgcactccagcctgggcgacagagcgagactccgtctcaaaaaaaaaaaaaaaaaaaaagaaaaggcaaaaagaaacaggtgaaattaattgtcttaatatctattacttaaccctatctatcaaaatattatcattttgacatgctatcaatataaaaaatattaacaaaattgtttgttttttgtttgtttgtttgtttgagacggagtctccctctgtcacccaggctggagtgcagtgatgcgatctcggctcactgcaagctccacctcccaggttcacaccattctcctgcctcagcctccagagtagctgggactacagacgcctgccctatgcctagctaatttttttttttttttgtatttttagtagagatggggtttcaccgtgttagccaggatgctgtcgatctcctgaccttgtgatccgcccaccttggcctcccaaagtgctgggattacaggcgtgagccaccgcggccggcctgtttgtttgtttttaagagacaggatctcactctgactcccaggctggagtgcagtggtgcgatcatagctcactgcaacctcaagctactgggttcaagcagtcctcctgccccagcctcccgagtagctgggactccaggcacctgccatcgtgcccagctaattttttttttttttttttttagagacaggtcttactatattgcccaggctggtagtttatattctttttccataccaaatttaaaattagtgtgagttttacaccttataacacacctccgttcagaatagccgcatttccagtgctcggtagccatgtggatgttgtggggttagaccatggaacgatggcttcgtaaaggatgaaaattatagacagctgagtgatagaaagtttagaggctcagaaccatagaatcattggagcttacagtcacaagtgtccttggtctatctgtaaaatggggtgctgaacatccatgggtgatttgcctaagtggtgaggctgagaccagaactgtctcctttctgggttccgtaattatgaactttaccatgtgccccatcacagtgatggcattgaacatggtccaaagaaaatagcctcagccctgtcccctcagtgggcactagacgtgcaacatggcagatatgggggaccccaggcagcagaatgcacacagtggcacaggaaggcagacagcatcctaactgccctctcagccagcaggaggggagtccacagtctagttcagttacctgagggaaaccgcccaccaacccaggagttcttcctggaggagagggttctgatgtttggagagggttggcttgacaagctgtgagggacagcagttgcttcaggttttcctgcttgtgatctgtgatctctgctctcttttctctctactccaatgtgccccctccccaccaaggtcaccgtcaactactatgacgaggaagggagcattcccatcgaccaggcggggctcttcctcacagccattggtgagttggcatggttgccgtctcagtgccttcatcacccagggcctggcactgttgtccttctctggggcacttaggcggttctcagtgcggctgacctggcacttggagcttcttctgaatggcacaggcctggggagggatgtcacatgtgccccaccccggtccttccatactggggtgggggcttatctgcaggaagaggcactccctgatccatcagcaacccccccccaagtgtcaaggtccccttcccaggctctgtggccctaaaagagaaaaaggtgaagtgtgtttccccctgcctctcccctgcagcctggagaagagtgtccctctcatggtgaggggaatggccacagtctataaaactagcagctgttcttgacaatcccagctgccccctggttctccccagattcagccccgagggtgcagagatgcagcctccaggtccttaactcacctagtccaagtccttcatttgatccacaggatggtgaggcccagagaggttagggaatttattcaacatcacacagcaactgggtggcaagttgagtccagaacccagaattatccctgtctcaggttctctccattgcatcacactgccctgcgctgggtgccaggcctgcatgccagggaggtggagcctagcctggctctacaggacccttggctgtgatcatctgaattttccatcactccaccccctgaaactgaggcattacttttatgctattttatttcattttttaatcatagaatgttaaagccaagaggacatttcagagggtcattttgttcatccaaccttggtttaacattgacagagttgccgcatggcagaggaagggaactaccagttattgagagtcaactgcatgctgagtgctttcaaaataatgatgcggcctgcttattgcaggcctactgtgtgtctagagctgcactgggcactttgatgaggaggaggagggggagaatggtaaacacctgatattaattgagcacctatggtgtgccaggctccagtactcaatgttttaccgtcacgatttcaatctcttcttccaactattccaaggatagatattattattatcatcctcattttatagatgagaaaatcaaggctcagaaaaggtaaaacaaatacttgcctgcagctacatctccagaaaatggttggtgagatgccaatcattccagttatcccacattctcagggggggtctcagaatctccccaagatacaactaactcccgagccagccccttcctctctagccctgtgctctcagctgcttaaacaggcttagcagcagggcccttctcattcttggctaattcccaaatgggcttggttgctggtccccctgtccctctttctgtcccaaggaggtgcccagccctggggtagggaacctcgggatgaccttggtgagggtggcagatgatcaacaaagactcctgggttgtactgagccctggcacgtgtgtgaaccttgcatgcacacagcatccaggcagtctcagatgacagtccctgaggaaacctaatcccaccaagatagggacacctgaggacgggggcaggaagggcaggggcctgacacctgtcaaatgaggatgatcccagaaggctgactgcaccattaacaagacttccaccaaagcaagacagacttaggatagatggcaaaataagcgtctataaggaggcaggactggacttttcctcctcactaggagatgacaaagctgtgcttagaggaagcccgctcagagttggcggcatggctgagtcccaaaagatgccacatgtgcccacgacaagtgaccaagttcatccttccgaggtctgttaataattatttatttaactgccacaagttccagatatttagattccatgggccaatcaaatgtcccctgcccccaccccccaaaaaatgagaacactaacaactttgatgcttggcaaaaaaaagaaaaaaaaatacatcaataaaacaatttgtggccaggcgcggtgtctcacgcctgtaatcccaacactttgggaggccaaggtgggcagatcatgaggtcaggagtttgagaccagcctggccaatgtggcgaaaccacatctctactaaaaatacaaaaattaactgggcgtggtggcacgcacctgtagtcccagctactcaggaggctgaggcaggagaattgcttgaacccaagaggtggaggttgcagtgagccaagatggtgccactgccctccagcctgggcgacagagcgagactttgtctcaaaaaaaaaaaaaaaaaaatttgctatcaactatcactatcattttaactcttaaaaaataggcaaggcataatctcagaataaaagacagtcatggccgggcacagtggctcacgcctgtaatcccagcactttgggaggccgaggtgggcggatcacctgaggtcaggagttcaagaccagcctggccaacatggtgaaaccctgtctctactaaaaatataaaaactagccgggcatggtggtggacgcctgtaatcccagctactcaggaggctgaggcaggagaattgcttgaaaccaggagacagaggttgcagtgagctgacacagtgccactgcactccagcctcggcgacagaatgagactctgtctcaaaaataacacaaaacaaaacaaaaaacagaataagagacagtcattcaattgcaaaaagaaactaacaccattgaacttctgtttcctgttccaacagagaccctggtgaaaatctggtttcccttggggaccactgttctctctgtcccttctaggttttctcttttctcgagcatctgccccaggagcccttgagcccgtcatcctgagtaatcaatcactcaggggcagcgcctcagaggcaagcccccccccaaccccaatatcttgagaggctgggactgtcccctgggcacaaaaatgtatctgaatctctctcaccctggtcctatcctgagtccacattgagcagaaagagccttggcttctgggtagacagaagtaagcctaagatctttctctgtcccctccagccagcttgtgacaagtcacatcatccccctgagccttggcttcctcatctataaaatgcgcttcacagagcagccttgcatggtgtttacaaggattcagtgggatgttgtgtgcgaagggcccggcacagagtgggtgcttagtcaatgctccgcctgcttttctctcttgctcttgaggtggccgcattttctctctgcctgggtgaagttaaagaaatgtatggtctctccttcttccttctgggatttgggagcaaattcatgattcctttggccagatcaggctctgggtctttgtcccaatcccgccaaggacttgctgtgtgaccttaacaagtaaccacccccactaggactcactttttacaaactataaaataaggggtttgagctaattaatccctaaggaccttcaagaccctggttagggttgatttgcaaagacttccattttttgggagggatgggggagagcaagaggtgaggtgtggggagggaggaagaatcccaccctatttgaggtcctggcagtggaaggagtacacatatgcgggccccagaaaattttaacatcaacctaaggggcttgatcctatgccttctccccagaggctgggatacttgccctgattggctgtgggggagggtgtccttccttcccataacatctcaagctgcttagtaaggcaagaaggccaggcaccctgccactctctggcgaccctccaaaatgcttgtgcctctcggtcagagctgaggcttcagtgtcttcattctcagggcagactgccttgaacccaatcctagggacatttcccgtcaatctgccccacacccaggagccacctgacgccttggggctattctggggaactgaggtgggatccagagcctctgggaaatgtcgtctggagcctggaggccctgaagcagagctcctctccctcctccccctcgggaaggcagagccatcccaagaggcaatgctctgggcaggtcacaccagccctgttctctgcccctacccgcagcatcccactggaatctagttaaatcagacattgggggaagccttgcaggggcgaagtcccatgggcatgactacagggtgggcggtctctgagggtgaaggggccagaaggtcatttcagtggattatggggacaggtcatgggtcatcagagaggagttatgaagccctgtgagaggctgggaggacgataagggagccacactgtgaaatgcccacatttcgtaacaggaaggtaacgaaacctgtctgaattcagtaaatcaggaaatcgcaataagcatgagagaggttgccttaggcagctgagaagaagggctggacaaggaactgctgtctttctttagaaacagtgtgttactattttatttgattttgtttgtactatgtccaaatattacatgaataaaatgtttccatttaagaattcataatgaaatgaagcagtatagactgcaccataatttctctcctagcccacggccccactgctttaatggactcgccacaaggagtcccaatgtaatgtcaccttacggcctagagacgaaggccgcagggctaccaaggtggggaaatgggcacttcctctgggaatgaccttcaagggagcaagtcttgtgtctttgactttgggctgggcttttggaaacagcttgcagggaggtcagcctgggttcattgcagggaacagcagagagcaggcagccggagtccgaggccctgctgagagcctggctctgcgttctgggaacttcggtggtcacttccctgctgcgggcctgggtttcctcatctgtatcgttagggggtgggggtggtcacgcctcccctggagtggccgagagaacacaccttggaaaacgctgtgcagctgcagagcaggatgcccgcaggggagaaatttttaccttgaaaaggacagagtggctccctaaagaggctggacctgcggctccttccgagggaggagtttcaggaagccagctccctgaaaggcagcattcagtggacgtgaccggctggaaagttcacaaaggtccaggaaccaaaaccagtattattcctgcccctgcaccccaggctcttagcccctggtggtaccgccttcccttctttcccctggggtccttatcctgcaccagcctcccagattaccagcccgatttgctgacaagtggcttctctgaacctgggtttgctgccctgtgaaacgagagcaatgctattcatctcatgggactgtggacgccttgagagcaggtgctgtgcctccattgcccgttgcctggtacagctcccggagcagtagctcctcagcagtgaaatgtggagtgaatgcgatcggagggaggaggttacaaattatgccttacagcacctaactcaccgcacagctgcagaggctgggacacacaagactgcctctctcaagggccaggcgcccttgcagcctccttctagactggaaaagtcacatgcaggtctagggtatgcaggctataggcaaagggaggacctgaatgtgatctctggactctgggcttggttggcccagagaagggtgacatcagtgcacttcgtgtgccaggaccctcctttccatgccctccaggcagagggtgtgcctgccacggggactaaccaggaatgcattcattaccacccagcgcccaccaggtccaagtcatgctcagcgtgagatgagcccactcgggcagctctggggacctggaacgggcacatgtcatgtgtgtgacactcccaacaccttcccaaccacatccctactcgacctcatccgtctccaactcaaggcaatttcgcctcccaagggacatttgacaatatctggagacatttttggctgtcacgactgggagggatgttactggcatctggtaggtagaagccaggagtgctgttaaacatcctacaatgcacaggctgcccccacacaaagagttatttggctcaaaaatgtcagtagtgccttccattgcagctaatgcatctgctgtaaccaggaagggccccatgttacaagtgaggaaactggggctcagagaggtcctctaacctgcccaaagtcacacagcttataagcagagaaccagggtctaaaccccaccttgtctgatactaaaccttttcacttccctacagtctccacaaagcctgtctccatggcaggcctagggatgctgagggtcccttcaccaagagaagggataagtgggggcctggccctggatcctccatctagactcacaggtgacctcagaccaagaggggttagagacagcttcccacccacagtaaaaccctcagtccttgaaggtgggatctagcccactggaagttctgggagagaaagagacacgcacacccaggtgcacatgtgcacacctatgcgcatgcccgggtagactgagaaaggcagtttgggaatgctatccctgttaagttttcagaatatgaactatgaatcagaccaaccgcactgtgtaccccagttctgctagcgtccctatgtgatcttgggcatgcgacttcacctctgaactgaggcatccagatctgtgcagcgaggatcattccccaacccccagccagaacaatgaagtggtaggaggtcccagacctccccgatggcagctcttgcagccgtaagctacgaggtccacacggtgtctgctgacggtctccagtgggtagtgggatgttgaggcagggggttgcataagatgacttcagcgaggtcctctctttcccgtgaccaaatgaatggctgagacgcacccaaatcccacaggtcttcctcttgcccctgccctgccctgcctggcaggctcagcaactcacccatgtctcttctccccagagatctccctggatgtggacgcagaccgggatggtgtggtggagaagaacaacccaaagaaggtacctagctttcagggcaggcaccaccctgaacccagggcttccgagggcacagccccagatcccgcaggcaattcccatttcacagctcaggagactaaagcccaagacaggctcccagacacacagcataccaatgatggaacccacagaggagctcaggcatctcctagagacggcaacagagcaggctcctgagtctcagtttctccatcccatgatggggacgcccaattcatggaactgctgggaaggataaatgtgcccgctacagaggaagcactgtgaaggcatttgctcttattattttgcctgttcttttaagactagggaggtgggggagacagaccctcaggacagagggtcgcattcatcattctcagttccaggcgtggtattatctctgctggtgcatgcacggcccctctcctctttctatttattcttgcattcattcaccattcattcatttgttccctcgttcatttacttattttcttttatcttgcattccccactcccattctgctcccccacagaggaccattttgctgggtttaatgtgtctctttctgctctggtgactctcaggaggcatgtggtgtggttggtgtgcatgtatttttaatttgtgcagacggcatggtgttctccatcacattctgttttgtacttttccctcaacctagtttttaggctccatcagtcttgctctgtgtacattcaggctgttgcttctaactgctttccattttctgcccttctgtattatctcaatttttgccatgggcatatgtgacttttataataacactctgaagcctagagtaaagtatacatagaggggtacttacgaagtaaaataaacacagcctgatgagaagcctgggtcctagcagcctgctaccctgactctctgcaggtcaggagagggttctcagccatgtggggaagtcccttcttctaggatcgtgagcaaggcttgcctgagaccagggccagccctgcacactcattctctgagtctatggccaagccatatgagaatgaactccacagaggcctctgaaacccagcagccccagggcgacagcttccaacctcccccaaggggctgggcagtcttgggaaagtcacacgatccccatgagcctgaacttggccagaatttttaaatctgggccggtgaagttttcacattttcttcactcatcccataaatatttgctgagcatcttttatgttccaggagcgggtcaggcccaggggacacagaaagaacaagagaaacacagccctggccttaaggagcccatggtccacattaaatatggagtgtttcggatagctgtgtcatcacagttgtcctaagtcctcccaaaaaggatgtgtacagggccaggtgtggacccggggaagctgctctgtcctagagaatcagaaaggcctccaggaagaagagacagtcatgctgtaaccgaggaagggtagagtgggccaggtggaaaggggcaggacaggagcagagggactggcataggcaaaggcctgggagcttgagtcttttgggagcagaaaggcgccgggatgggtggggcagagtgagcgaggggcaaggcggaggagatgagacagagaggaaggcaagtttcaccaggccttccaagccacagcaaggaatcagggcttcatgccaactcaactgggagcccctgacctggcttaaagcagggaagcaacacaatctggcccgagtttgttctagtagtgctatggctgcagtgtagaaagtggagcaccatgcaggtcccattcggagcactaggagcgtgtctggaaacagctgggtggcatccatccaggcgtctcctcctgagctcccctagggacctagggacccatggtagaatgtctgtctgctcatttctctggccagcctccacctccctgcctccacccacaccagacaccagctgcaccagacaggaggcccataaatgcctcagtcagccttcctgtctctgtgcctctattgaacttgcctttgatgcccacattcatcctctgtggacatcagtcttgagattcacatttgccaggtcacagctgccccagtgggtggcggctactctttaccctcatcctggggctatctctccagtgtcccatggggtctatacaagcatagagaagagggcactgacctttcttcctgccactgtaggcatcctggacctggggccccgagggccagggggccatcctgctggtgaactgtgaccgagagacaccctggttgcccaaggaggactgccgtgatgagaaggtctacagcaaggaaggtgccagcaggccctgcacttggggggcaggatgagaggagtgaaaagattcatgcccagtcctgggctgggctgagggtgaggcaggtgtggactcaggcctcctggggatggtggacacaaattcccactcttgcttaaagccaaaggcaaaaccataggaaatagacaagggccgggcgtggtggctcacacctgtaatcctagcattttgggaggccaaggcaggcagatcatgaggtgaggagttcaagaccagcctaaccaatatggtgaaaccccatctctactaaaaatacaaaaattggctgagcgtggtggcatgcacctgtaatcccaactactcaggaggctgaggcaggagaatcacttgaacccaggaggcagagattgcagtgagccaagatcatgccactgcactccagcctgggcaacagagcaagactctgtctcaagaaaaaaaaagaagaagaagaagaagaagaataaaaagaaaatagaccagaaggaaattcccaaaaggttaatcatctctagtgttggaaatgacaactggtttttattctgttttatgctttgcttttttctttttctttttttttctttttttttttttttgagacaaggccttgttctattgcccaagctggagtgcagtggcatgatcatagctcactacagcctcaaccccctgggttcaagccatcctcctgcctcagcctcctgagtagccaggattacaggcacatgccaccatgcgtggctaattttttttatttttgtaaagatggggtcttgctatgttgctcaggctggtgtttgtctcctggccttaagtgatccacccacctcaacctcccaaagcactgggattacaggtgtgagccacagcacccagcctctttatgcttttctatagtttccataatacacatccatggggattttttcctgattatcaaagtaaaaggcattgggaagctgaggctccagcaacagatagatctcttcattctcaccttctgtccctcagatctcaaggacatgtcccagatgatcctgcggaccaaaggccccgaccgcctccccgccggatacgagatagttctgtacatttccatgtcagactcagacaaagtgggcgtgttctacgtggagagtgagtgatcccagcccagtccagcctagacctttctagccacctaccctcctccccttagcagttgtggccttcacaggtgcaggtgcctggggaagacctggattggtctctgagtgattgtaacatggcaatgctgttgtcccgtgaagttgaaagactccatggggacacatcgctcctcctctcaaaggagtctggagtgacatgggtctatgtagaacccagaggcccttcctccctacgaatcaggggaggaagggcatttgggcacttcttttctggagtcatgtcaccttcaggatacctgaggcagggcaggcaccacctccaggtattttctgccatctctgactttcaaagaccccctaaagatgcagtgggcacccttgaagagttgaccccttgctcctctcgatggcaacagatgtcctgggcccccactgtgtagggcacgggctcctgccctggagctagtcctcgtagctgccggctctgcctcaccctgtctgtggatatgtgttgagccctttggtgccaggccctgttctcagctttgagatctctgcagtaaacacaacaatcacaccctgccctcaaggagccgccagtctagcaagagagacataatcagtaccacaattggaggaaatgaaatagaataagtgaggagaatggcagggcagaggcaccactagatgggtgcctctgaaaaggcctctctgaggaggtgacatctgagctgagactcagatgaacaataagaaggaaccagccactcgtgagctgagggaagagtgttctaagcagaggcaacagcatctgcaaagcctggaggaggagaccagtttagagtgtgggaagagcagatggaagcccagagcagggctgggagtcaaggtcagtcagctcggccaggggccagagcatgcagactgggtttggattttcttctgagtgcaatggaatgccattagagggttttatgcaagggactgtcataataatgatgtatgtgttttaaaaactccctcagcaaaatagtcggcattgcaatttgccatggtacaaggcgggtcgtggggtggcgggaggaggcttctgcatgcccagctgcctaggggggccaggatctctggcccagccccgaacccacctctagacaggcctactagatccagggcattcaccatgaggtgagtagggaccctggaccctcacatcagggagatatttagccaggatggcagtggccagcagccacccaataccagtcttccttctgatccaccctgggctccaagcagtgacctcacacaggttggaatgtgcccagagtcaggctggctccgctgccgcagggggccggagatgttgatgttgacaccatccaggccagggttgtcatggaggatgggatcaccagtgggagcaggagggatgcaagcaggacctcaacctcggcctcttgaccttggtgtcgtgacacgagacctgttgcaaataatgatgtctggacattatctagaagtttcttctttttgctaaagggagtggactggtctggttccataatctcatccctcctcatcacttgccatctgagatgggtcctgagcagacaagaaaaaagaggaactactaccacaagggctttgagaacgtcccttggagcctcttatttgggctgcccatcctgtggggagcagccacgactgagacagtggggacccagaagagacagtttcccaataatgctgacactgggtcactgggtgaaaactcttagacacacacacacacacacacacacacacacacacacaagcaaaggacgacagataattgaccaggagcacagtctctttttcttccaggcaaacactttggagttatgtcaaattccaggcacccctgtggatgagcgaatgtcaggtgtcctggtagggtcagaccagctctccccaaggccagggggctgggttggagactgaaggacccctatagggagtgctggagtcagggagctacaattctgggtccaggcaagtcttctcaccagccccagccttggggtgctcatctctgacgtggcatgggagtagtaagagttccgactgtcccgggtgtcccggatcgtggtggggatctaatgaggaaggtgtgtcaggcactgagtgcagtagctggcctttggaaagctctccataaatggcaattatggcttttgttgagattatgatgatgactgttagttacaatgattggagtggacagaaggcttcagtgctcctaggaagacctggtaacggccttagcctcaaattctgcccaaaacaccaagcactggggccttacctctttatacaaggaaatggtaatccagtttgcccaggactttccttattttagcactgagggctcctcatgccaggaaacccctcagtcctagggaaaccaaatcagctggtcacactatcaaggagtctcgctgggaagtggaatcattccaaagtagctagaaaggttaaggcaaaccacgtgccagccaatgcctggggcagagaggtcacggtggtcagtgggcccagcccaaggcacgaggaccactcaatagagcggcattgttggttcctgcagagaaagctggccacgctcagtgtggggtttgcaccgagccagggatggaggacggggtaaggaggctcctggggacaatggctgaattgttcccaccaagaaatcagtccgcccggagctggccccaactgtcagaaagcagcccagaatagaggtgcattgtgaatcacaggccacgggccacatcgggagggagaaagctgccggcagacggactagaacgtgtcctccacctgccccaccacccctggccagatccctgttcctaccccagaccttggtggagccccccaggtgctctgagccctgggaaagctttggctgtgtggcttctgccaggacaagttggcttctaagcctgactgtcccctgagcatcagttcaagtgcagcctggggcctgtgggcatgggagggcccgagtgcctggaggaaaatgttttcatgatgccagtctatctgaaactactgactgacagggctgcagggtgcacactattgtttctgggtgagcaggacctcactttctattctttgggactttcagtatctgaatttttccacctcatttcttggactcctccctcccaagggaggatgaggtgggacgtggtttccctgccttctgtttggaaactattcaatgaaaactccttcacatcctcgtaatacaggtccaagcagtgttactgatggttacccatggttactgaggttactgaagttactgagcctgtgtcatttacattgaacctgtggcgtgggtatcattatctcccacttaacagatgagtaaactgaggctcagggaggttaagtgaattctctgaggcttggtttttttttttttttttttttttttgagatggagtctcgctctgtcgcccaggctggagtgcagtggtgcaatcttggctcaccacaatctctgcctcctgggttcaagtgatattcctgcctcagcctcccgagtagctaggattacaggcacgcaccaccatgtccggctaatttttgtatttttagtagagacggggtttcactgtgttggccagtcttgtctcaaactcctgacctcgtgattcgcccgcctcagcatcccaaagtgctgggattacaggcgtgagctactgcacccggctccctgaggttttatagcttgtaaagccagagaagtatttaaaccaaggtccctctgacattggaagtcataaccactaagggaagcacccttagtgagatttataaccagggtctatttcggcacattgtcccacaggaggagccatcccaagccctggcttcgcggttcatccacttatttctcacgttttaatcaagcacctagtttgtgccaggctattcggcttatgtgttctaacccttgagcatctggtcattaaccattatcattgtcgttgaaagcactaagctgaggctgattctgcccttccagctctacagggcataaagaaattccttctggaactgcatagggtcctacctccatgcctttaccaatgcaagtatctcctctccccaacacacccatttctgccaacccgcaagggcatctcaaaggctgccttcctctgctcaaatgcttcccaccgtgcctcttctgccctccccaccctaccccaagtaaccagactggatctcacccatagccgccgttatgacgcttcccacatctgctccatcttatcatcagctgagcactgctgttacagaggctgcatttggaccacctctgtctccccgaaggtccttgcctgattcatgtgctctcaatctgcctgaaaattcccccttggtctctcccacagggaatgttgtgggagtcattggttcgttcagtagacatttgttaaacatgaccatgtgccgggcaggccctgggccccactgggcctgtctctaccctcgcacaggtcacccacatttaaaaaggctgtgatgaggccgggtgtggtggctcacacctgtaatcccagcactttgggggtctgaaggcaggcaaatcactaaaggcaaggagttcgagaccagcctgaccaagatggcgatgaaaccctgtctctgctaaaaaatacaaaaattaaccatatgtggtggtgggcgcctgtaatcccagctacttgggaggctgaggcaggagaatcgcttgaacccaggaggcagaggttgcagtgagccaggatcatgccactgcactccagcctaggttacagagcaagaatctgtctcaaaaaataaataaataaataaataaacaaacaaacaaacataaaaagactgtgatggagatggcaggtggctgtgggagctccaaacagagcccctggctttgtctctggggaaactgggctggattgttgcaagtgacacaaaccaaggcctgaaggaagaagggacacaattgtttcaggcagaggggagagcacaagtcaaactgggagctttcaggagggcaggagccctggaggaacctatctttccgcccagccacaaaaatgaacagcccatgcactggcctttacaccaacacggcttccatgatatggagggaatttttggtataatgggcacatttatggtttgtttatacagaggggatgagagctcgggattcagaattcgacttgaatctgagtcccagctcagctatttactggctgtctgactttggacaagccactcctcctttctgagattggtttcctcatctgtgaaatggaaacaattacatcctcccctggaaccactaactgctcagctggcaatttcctatcagccgttcacgagagagcttgcttattttatagatggggaagccaaaagccagagagggtgactgtctggcaaagcgccacacagccagcacacagcagtgctgagacaatgacaatgacctagccatggccattctggtggcattttctgcttgtgcttttctctctgtctagaggacaagttactttgcccttttgtccccatcggtgatcccaccccaccgacctctttctgatgcgggtgggagtctgacgttggtccttttccctccagacccgttcttcggccaacgctatatccacatcctgggccggcggaagctctaccatgtggtcaagtacacgggtggctccgcggagctgctgttcttcgtggaaggcctctgtttccccgacgagggcttctcaggcctggtctccatccatgtcagcctgctggagtacatggcccaggtgagggctccaggcctccaccacagggggctaaccccaggggccagggtgggtctcctactagtgggccattcctatgctatgctccaccctgctcaaagcgccaaaggggtgggtccaggctaggagacctcgatgccccccagcaaagcctgcacgtgtctgccagggtcctctgagccatgctcctgggatcagtctccttgctgcttctgctccccacggattccctgtgggcaatgtttcctgacacactccacgcctgtgtcctggcctgccctgctccctgcctaggtctaaggcccagagtcctgctgattagcgcgaggctctaagcagccacccaggtggggtttgctgaccacctactgcgcgctctgtacttcctgccccactctgacccctcccccaactgtgggttataccaactctgactgcaggctgaaccccaaatcccagtttcaggttgtgccctaccctggggccaggcatctcagccagccttgctcttgctttggggagaaactggatgaggagaagaggtcctgtccctctagagaagcccccatcactgagggcgtgctgtgctcacaagaatctctatcacaaagacctttcatccccagaccctagcctctcaggcccaccctgtttcgctcagaaaaaaagggaaggacctggctgctctcgcaaacacaagagcccctcatttttatccccaggccactttgggaaaggatacaatgggtgctatagaaaggtgaggctggatctagctgagatgtatgagaatgagccctggcagccgactgcccaggttcaactcctggtttaaccaccacgagacactaggcaaatgaattaaacttcctgttaatttccttagttaagggtagtttgccatagtttctccatctgtaagacagaacgtccaaaagtttctgctgccgggggtggttgtgagcatccaaacttgtgaagttctacttacaaagcaccctcaagctccctgggaagtggaaaaggcaaagctaacaggataggggacggggatggggcttcttatggcacccatgcccagggcagcctgacccccaggatctctcaggcacccgcagagactcaaaaggcagaccacggcaagcaaggcaagccgtgcaacagtcccaccacccccgcacctccccaccaaggatggggtccatttcctatatcttttgaaagccagccccacaaaggaaccctggaatcagacctcactttcccttgggttccaggcaagctgcttgaccattccttaaaacaaaacagtctggacatagcaaaactgacccaaaacaacgcgaaaatgcccacatacagaaaacggcaaggtgccaagggcaaaaacagaggaaggtggggggctggctcagctgttgcgtggggcgatttcaggaagagaagtttgatgggacaagataggacagtggttaagagtgtgacctcagcagctgactgcctgggtgtaaagcctaccatgtggtcaagcacacgggtggctctaccacttaccaaccatgtgaccttgggcggttaacagccctgtgactcggtttccccatctgaaaagtgaggatcatagcagtatctacctcctgcggtggtcggaaggcagaaaagaattggcacatgtgaaagtacttagcacaggcttggtgcatagcaagtcctgaggaaatgtattcactgtcatcagtttcacccgctttgaaaggcaggcaaagaaagcacctgacaaaaccttttgatcccccacgccttgtctcccacacccaggacattcccctgactcccatcttcacggacaccgtgatattccggattgctccgtggatcatgacccccaacatcctgcctcccgtgtcggtgtttgtgtgctggtaaggggtgaccccagcctggagaggcagcgtggcagagtggccaagggccgagtcagatggacatgagtctagttcctggccccgtcacttaccactgtgttaccttgagcaactctcttggcctctctgaaatgcccacatcgtagagtcactgtgagaattaaatgagatgaagcaggcaaagcatttatccaaggcccagcacacagggtatgctctaaaaataatagctgccattctgttctcttgcttaaccctctaccaggcagttagcaacctcctatgcagtggaaatgcagctcatctgactcattcattaaacagacttttattgaccacctattatgagctaggtccacaacagcaagatgagaaccaagggaaaaagtgcctgtgattagatggctagcaacccaaaagggacccttggggtcctcacgtccatcccatcttcatgccaggcagagctcttctttgaaaatctgtggagtcagaggtgtaaggcattgggacaggtgggggtgagagttccccccctcattttatttgttcatgaccttgacaaacgccacatgagtgggtgggtttacttggcctttgattccagcggcctttataaaggtggccgtgagcacaggtgtagactgatctgcccggcacagcccagagataccagctgctgtcaccatctcagggagatgactctggcccctcctcaccctttctcctggcctctccttcttcccccaacttctcagcatgaaggataattacctgttcctgaaagaggtgaagaaccttgtggagaaaaccaactgtgagctgaaggtctgcttccagtacctaaaccgaggcgatcgctggatccaggtaaggagcccaggtccaggctgggaaggacatggcccccgggtcaagcaaagaagagttggcttcatgtgaactgcctggcacccagcagctctgcagatggggattcttctgtcagctcatatctgcacatgtgcacaaagacataaacatacaagtgcactacagtgctgcttcttgtagtagcaaaagattgcaaagcaacctaaatgtccatctgtggaggactgagtaacggccttcccggaagttctgtgcaaccgctaaaaaggatgaagccagtctctcaatatggatacaggatgtgcttcaagttaagttgttactcaacggaaaacatattcaggatgctgcttgctatttgtgtgttttgttttgtttgagacgaggtctcgctctgtcacccaggctggagtgcagtggcatgatctcagctcactgcaacctccgccttgcgggcttaagcaatcctcccacctcagcctcccaagtagctgggactacaggcatgcaccaccacgcctggttattgtgttttttaaaatgaggtctaggccacgcgtggtggataatacctgtaatcccagcactttgggaggctgaggtgggaggattgcctgagaacaggaattcaagacatgcttgggcaacatagcaagaccctgactccacaaaaaaaaatttaaaaattagcctggcatggtagtgcacacctgtagtcgtagctactcagaggctgaggcaggaggaccgcttgagcccaggagtttgaggctgcagtgggccataatcatggcactgcactccagcctgggcaacagagtgagaccctgtctcaaaaaaaaaaaaatggggctgatatcggtaagaaacctgcctgtgatgtgcagagactgcctatggacacctgtgctgccatcatcagtgtgaggggaggaggatgggggaccagggaatggggaacaagacagacgttcttcttcctttgtgctcttgtgtttctcgagttttctgcccatgtgcacaaattgtcccctggattcgtctaacagttctccttggtgtccctgcaggatgaaattgagtttggctacatcgaggccccccataaaggcttccccgtggtgctggactctccccgagatggaaacctaaaggacttccctgtgaaggagctcctggtaagatgctgagggccacttgcgggtggagcatgatcctggagattctcataagacagagtggtcaggagaccctgggccgccttgacacattcatctgctgcccagagcctctgtttctcctctgcaaaatgagtccacttgggatagctgcctctgaggtcctttcctgctctgataactgatgtttttccaaaacatagagagttttctagtgggaaatgggaactaagggaaatagagttaagacctagttccagaggccctggcccctgctgctgcccttcccctccaaattgcagcaaaatgagttaagtttcaaagaggaaaaaaacatagttatgcaattgtcaaaagtcatggttccaacttccaagttcatcagcactttgaggctatggtttttggtgcgtgtgtatgtgtgtgtttgtttttgttttctgagacaagagtcttgctctgtcgcccaggctgaaatgcagtggctcactgcaacttccatctcccaggttcaagcaattctcctgcctcagcctcccaagtagctgggattacaggcatgcaccatcatgcctggctaatttttgtatttgtagtagagatggggtttcaccatgttggccaggctggtctcgaactcctgaccccagatgatccacttaccttggcctcccaaagtgctgggattacaggtgtgagccactgtactcagccatgttttttgtttctttgtttgtttgtttgtttgtttttaagtcatctgactcctcccattctggaagccattctcagtccccttttaggcccttgacaacctagtgtgtgaagttagaaccgaaaccaatctttcttttgtctgcactcttctgccctgaacaggctgggggaggtttgaacagggcatgaaacaagagactggaatagatcaggggacttttcccaaggtcacatgcaggacagcattcctgtcagacgccagggctgcccagagctgaccctgtgccaggttcacacctgttctgccccacattccttacccagtgccctgttcacaaggagatgctagagccaatggtgtcagcacagagctttggaatgtcaggtggacccggtcttgagtcctaattgcacctcttagcagccatgtgaccttgggcaagcaattaccttccacgagcctcagtttcctcatctaaaatggggatagaaatgatatcagtctcacagaatgttgtgaagattgaaggcgttgtataaggcatcagtgccatgtctgatataatgaccattattagctgttgttatggttatcattccccgggccctgtccttagtgagcttattgtccactttccctaacactatgatgagtagagtcaaaccaaccaccagcaccagttgccacaggcatgagaagcgaggcctttccaggtcaccacctgccttcagtattccaggctggcctggttccaaggccccaggctgcgttgttccttgaggcccaggccaggcccggctttgtgctgcatacctgcccacctgtatggtgctgcagagccccagcaccccagccttggcaagctcccatgttgccagctggggccccaagatgagaaagcactaggctgctgccatctaccccatgggctcagctgtccctggagcctctcagctgagccaggataagccacatcctccgactccactggattttgtaaggcaagcttcatcccaaccccagtgcaagctcccaaacaagattcctatatttgtaccccaaaagccatgagaggaatgttaaaattcaggggccaatggggttatgacttgcgggctaactccaattttttggagctctgtgtgaagaagggttctgaggcttcctctgggctcagtggcaagtctggcaggttgagactgggttgagatgtcatgtatattcatagctgccacttttgcatgtattggtcagcttcaccaagtaacaaaccaacccgaaatctccatgaccgacaacagcaaaggcctgtgtcttgctggcattccatgttgattgctgctggtggtctgccactctgcttctttatgccttccttactctagcgctcaaggtgccagagcagccccagtctgggaaatgccattctcctagcacagggagaattcaaagagttggcagacacacgtgggggctcctgtggcttctgctgttcactggcatgcatcccttctgctcacatttcattggccaaagcaagtcacgtgaccaagtctgacactgggcagggaagtatattccttttgcaggaagatgccagaagtcacatggcaatgggtcaggatgcaaaattctcttactgcgcagagggtagcaaatctctggaaataataatactagctgctccccttcctcaggttacctaatctggtaactctcttatagatggggaaacgggctgggcgcagtggctcacccctgtaatcccagcactttgggaggccaaggtgggtggatcacttgaggtcaggagttcgagaccagcctgggcaacccagtgaaaccccatctctactaaaaatacaaaaattagccaggggtggtgcttgcctataatcctagccactggggaggctgaggcaggagaatcacttgaaccaagaggcacaggttgcaatgagctgagatcatgccaccgcactccagcctgggcgacagagcaagactccatctcagaaaaaaaaaaacaacaacagatggggaaactgaaagtgcatagcataaaatgcggactaattctgaaatcaccaatatgtatctgtgcttgggaaatagaggcatacacaggaatgcagatgcccacacactcacattcacactcacactcactctcacactcactctcacactcactctcactcgcactctcacactacaccgagatgctcacacactcagcctccccatgcccaggcccctgctctttgttaatcataggaagaccgtggacaacccacctggaaactgggtgcccacagacccagactgaaggtgataaaagagggtggctggcttgggggctgaggaccctggctgcagaagactaacgcaggtgtgtgccctctgcctagggcccagattttggctacgtgacccgggagcccctctttgagtctgtcaccagccttgactcatttggaaacctggaggtcagtcccccagtgaccgtgaacggcaagacatacccgcttggccgcatcctcatcgggagcagctttcctctgtaagagaagccaggctggggctaggggctgtgggagtggggaagtcactgtttctcttttggggtggcctgggttgctcacacatggagcaagtggctgggggaattattccctcccacgacttcctgttaagaggccgacactcttggaaagaaaatcaagctagcctttatatctttgtgtgatttaggatctaatatataactaaataaacaactcttttccccaagtggaaaggtgtataatgagattataaatcagctggttggtggggcacggtggctctcacctgtaatcccaacactttgggaggccaaggtgggcagatcgcttgagtccaggggtttgagaccagcttgggcaacatggcaaaaccctttctctacaaaaaatacaaaaattagccaggcatggtggcatgcatctgtagtcccagctactcaggaagctgagatgagaggatcgcttgagcctgggaggtggaggttgcagtgagctgagatcacaccactgcactccagcctggcaacagagtgagacctcatctcaaaaataaataaatagataaataaataggctgggcacagtggcccatgcctatagtcccagcactttgggaggccgaggcaagcagattgcttgagaccagaagttcgagaccagcctggacaacatggcaaaactttgtctttactaaaaatacaagtattagcaggcatggtggtaatcccagcttcttgggaggctgaggcatgagaattgcttgaacctgggagccagaggttgcagtgagctgagatcatgccctgcactccagcctgggtgagagagagactctggcaaaaaaaatcaggcctggtgcggtggctcacgcctgtaatcccagtactttgggaggccgaggcgggtggatcacctgaggtcgggagtttgagacctgcctgaccaacatggaaaaatctcgtctctactaaaaatacaaaattagccgggcgtggtggcacatgcctgtaatcccagctactcaagaggctgaggcagaagaatcgcttgaactcaggaggcagaggttgcagtgagccgagatcgcgccattgcactccagcctgggcaacaagagtgaaactgcgtctcaaaaaacaaaataaaataaaataaaatattaaataaatcagctggggaagggatggaggagtccagagaaggaaaactgacaggtatgagtgggagcgtaccaatgaatcctcagggctaccatacttaaaagaggtatgagcagacgtggtcctgccccagaaatgtgagtccctggctccctggcctgtccatgattctcctcactccctgcccagttgacccaccagccagtgaaaagacagattcttccttgtcagggcagtcgctggggaaagagtgaataccttaggttctcacgtcacaaaagggctgccaggagcctgcacagatggggtcagccaggatttggccgccagtttcctccgagccacatgggatgctcagccttctgcggggaggccactggcacagccagcgactgtttgcccacttttgcctccttctccctccactcagtggccactcattcactcagcaaccatttcctgagcaccagccaagtgccaggccctgtgtcaggcacagggtcccaaacaggaagcccagcccctgccttcaaggagatagcagaggtctcaggcatgcaaatagaccctgatgaaatggagggacttgcaacgatagaaagaataacagggagtcaggtcagcccagggagtggccctgaaccccctcgaggagctcaggggcggcccttaaagacaaatatttattgagaaactactctgtgccaggcactattctaggctctggggatacagcggtgaccagaacagatgaagtcccagctctccgggagtttatagttgggtaagggcagtacagaaaataaacatggaatcaagtaaatcaattagataattctgaatgctgatacatgcaatggagaagataaaacagggtgacatgataaaacattcctggggacaggggtgccttagctgttgtttttttgaagatgtgactagagttgaggcttggatgttaagaagtaggcagccatcaggagattgtaaaggaagcgcattccatacagaaggaacagcaaagggaaaagccccaagggatagcaagtgtagcaggtggctggagcagacagaaccgggggaagggagggaagcgagggaggagggctggccaggagccagatcagaaaggaatttgttggccaccctaaggagctagggttatcttcggaggataatggagagattgcagaccttggggggtctagaaatgaggaagggctggccgggagcggtggctcacacctgtaatcccagcactttggaaagctgaggtgggcagatcacgaagtcaagagatcgagaccatcctggccgacatggtaaaaccccatctctactaaaaatgcaaaaaaattagctgggcggggtggtgggcacctgtagtcccagctacttgggaggctgaggaaggaggatcgcttgaaccagggagggagatattgcagtgagctgagatcatgccactgcactggtgacagagttagactctgtctcaaaatacaaaaaacaaacacacacaaaaaaagaaatgaggaagggcttcctggaggaggtttctcttgaactgattaaagattaaagtaagtccaggcacagtggctcacacctgtaatcccagcagtttgggaggccaaggagggcggatcatgaggtcaggagttcaagaccagcttggccaacatggtgaaaccctgtctctactaaaaatgcaaaaattagccgggcgtggtggcacacgcctgtagtcccagctactcaggatgctgaggcaggagaattgcttgaacccgggaggcagaggttgcagtgaaccaagatcatgccactctactccagcctgggcaacatagcaagactccatctcgggggaaaaaaaaaagattaaagtaagtagaagttaatgtagcaaagaggcacatggatgagggcagattttggagccctcctgtgccctagccccgtccagcaggccaggtgggactcccgcacacaaaaggtagcctctgcacactcactggcaccctcaagggctgaagcctgggctccctgcccttcacacaggccgcagctgcaactcacacctactctttcccctgggactcaaacgccttactgcctgcgccagggtctcttaacccaacctagtctccttcctgggacttctctgctgatgtcactctgggtccgaggtgggtcccagagaccaaactcctcttgcaggccctctggtgcggtgggtaatttgctgaaactcctcttcctcccttctccaggtctggtggtcggaggatgaccaaggtggtgcgtgacttcctgaaggcccagcaggtgcaggcgcccgtggagctctactcagactggctgactgtgggccacgtggatgagttcatgtcctttgtccccatccccggcacaaaggtaagctagcctcccgaggctggagtgaatggggtagcagcaaaccaatatattacccgcccctgccagcagagggcaagagctagaggaactcgacagcataaaggaaggaggaagtaggctgaagctggtttgcatgttgttgctgtggcaggtaaaattttaaccccataaatccaaaatgttagcattgcaacacataatcagcctaaaaattattaacgagagatttaaattcttttctcatactaaatcttcaaaatctggcaaagattttactcacatgacacacctaaattcagactagccacagctcaagtgttcaatagtcacataaggctagtggctattgtgttggtggtaatgctctagagagaaataggttatgcacctgtggcactggaaagaggttctttcattttcttatgggtacaacttcataccctggaaattctctgcaaattgtgtggctgcttggcaacttggagatgtcctgtccaagtccacctttgactctgagccttgatctggtgacattgctgaggtagaggaaaggtgagaaatattcctctgaagcagagaacaccctccccgtcagcctttgccactcggcatgggaggcctgaggcaatgagcaggcaaggcactgggtcctcagcgcagggcctccccgtgctccttgggtgccttcccactgctgactctgtccctctggactgtctcttgcagaaattcctgctactcatggccagcacctcggcctgctacaagctcttccgagagaagcagaaggacggccatggagaggccatcatgttcaaaggtgagtggccacagggccttgacaggaagtggcgagctggaggccccagagagaccctcgggagggtggggcagataagcactttgtccctgagcacccagctccacttccctgggtgtctggcccgatcgggggtttgtgaggtcgccatgctgggaagcacctctggcctcctgtgacccttgctgtggctgggtggactgtgagctgcccacagctccttagtgtcaccagcagtgcatagcgcatcttcaagccctagcgtatactttaaatggcaccagacccagtggagggttaaatggttgaaaactgacatgcagctgggtctggtggctcatgcctacaattccaacacctttggaggctgaagaaagaggatcacttgagtccaggagttcgagaccaatctgggcaacatagtgagagccccatttttataatactttttttttttttttttgagacagagtttcgctcttattgcccaggctggagtgcaatggtgaaatcttggctcactacaacctccgcctcccaggttcaagcgattctcctgcctcagcctcccaagtagctgggattacaggcaggcaccactatgcccagctaatttttttttatttagtagaaactgggcttcaccatgttggtcaggctggtcttgaactcctgtcctcaggtgatccacccgcctcagcctcccaaagtgctgggattacaggcatgagccaccacacccagcctctctataataaaaattttgaaaaagaaaaggaaactgatgtgcaatctgcattcaaggagcttgtattttagaaagagagatagaaaatagatgcaatacaatttagggacaggaagaaaagtggactttagtgggcaaaaggcatggtcagacatcgtggttgtcagtccagaagtgagacattatcttctacgtttagacattcacataattgggacagacatagtcgggatgaggtttgcatttgaattaatcacggaaagagggaaagatgatcaggtggagacaaccagccaggttagagacaccatgccaattcctcatacttcttttttttctttttcaacttctattttagatttagggggtacatgtgcaggtttgttacctgggtgtattgtgtgatttggggtatgaatgatcccatcacgcaggtactgagcatagtagacaacagttagtcattcaactctttccctcctctctccctccccactctaatagtccccagtgtttgccattgccatccttatgtccaacatgttttttattgtgataaaatatacctaatctaacacatttgttattttaaccacttgtaaggacacagttccgggacattaaatacatctacaatgctgactaaccatcagcactctctatatccgttatactttttttttttttttttgagacacagtctcactctgtcgtccaggctggagtgcagtggtgccatctcggctcactgcaagctccgcctcccaggttcaagccattctcctgcctcagcctccccagtagctgggattacaggcgcccgccaccacgcccggctaattttttgtatttttagtagaggtggggtttcaccatgttagccgggatggtctcaatctcctgacctcatgaaccacccgcctcggcctcccaaagtgctgggattacaggcgtgagccaccatgctcggcctatttttttcttaaattacttttgtcacttttcaggttggtatccataatatatctcatgcctgaaagcctgagttcccgcagctggttgatacttacatgactgcccctcagatccaaagacagtgttcctgactgtcactggtgtctaggacagacaagaccaatttaacaccaccaccctttttaaattccccactgatgggaagtttgttcttggattggcaagcttgagtcctgacttcctggaggcttcctctctaatattaaacataccctcaaaaactacccataggatatagggaccattatttttgtacaaataggggcaagcagtgccccagatttctctttgtattttagaaagagagatagagagaaaatagatagaatacagtttggggacaggaagaaaactggactttgatggacagaaggcatggtcaggcatcgtcattgtcagttcaggagtgaaacattatctcctggacttagacattcatgtaattgggacagacagagagaggatgcgcggatgtgcagtcagcagagagtagaagcacataggagacctggggaggaaggtgaaccaggcaatgccaaagagccaagatctccgctggaccagagcccacaatgtttggggaaaacacatccctttaaaagatgataaaaactacagacttgccctccagaaaaatgcttatatcaatctatctcctgaacttggatcagttttagaaaatcacagatccctaaagttttctgtttctacctggaccctcccttctgagtccctaagcctcaaagattacatccggcttgtagctgggcatctttactgctgtccagttataaacctgggaagtgcaatggaccagcagtctcttcccagatgaggccaaaataaataaacaaataataggttaagagcataggctctggaatcagactgcctgatctgcacaccaactctgccgcttgctagatgtaagtcctgagacaagtcacataacttctctgtgcctcagtttcctcatttttcagggtagtgactaccccatagaaatgtggggaggatccatgagttaattcaatgtaaagcgtttagaagagcgtcggccacatagtaggtgctcattgagcattaggcattactaatcaagctggaagccacataagccatcgtgtggtacaggaggaaaacgcaggccactccagagcagcagccaagatgaggcagctctggaaaacaggaagggtgtcccctttggccatgctgcttctgccacattcatgctggtcagctgctcatccttaggagtaggctgtaggtgggagaaccagggggctacttgtagcacccctgatcccactggccaaagcaagagcaaggcagctgccaccactgtcctggctcagatgtcatggtcaactctggagaaaagagtgtgtgctgccctccccagacagaggggggcctgattttgcctgggagtgccctcctgtgatccagcctctccccagtcccatctccccagtcccagtccagcagttagcccaggcctggaggatcttggcaaaaggggaacactcagcctgggtatctaaagcttgaccatcccctgtcctttgaaccccacaggcttgggtgggatgagcagcaagcgaatcaccatcaacaagattctgtccaacgagagccttgtgcaggagaacctgtacttccaggtgagggcagggcaggggtgcagggccagagggcccctgggagggatgaggctcaggcccttacatccttggggcttccgtagagaatggccaagggctcaggagctcctgaccccgagcacagcagcacagggaagagcctccaccagcatccagccagcctccttgctttgctcctgggctaaagtcccagggttaaagaagtgccaaattgtgccgccccctcacttggggaggtaggaccatgggcaactcactaaggctgtctttgggtctctcatctctaaaaaggggataatgggggccagacacagtgtctcatgcctgtaatctcagaactttgggaagccaaggcgggaggattgcttcaggccaggggcttgagaccagcctgggcaacatagtgagacacttgtctctacaaaaaaaataaataaaaactttggccgggcctggtggctcatgcctgtaatcccaactctttgggagactgaggtgggcagatcacctgaggtcaggagttcaaggccaacatgcccaacatgttgaaaccccatctctaccaaaaatacaaaaattagcctggcgtggtggcaggcgcctataatcccagctacttgggaggctgaggcagaagaatcacttgaacccaggaagtggaggttgcagtgaaccgagatcgtgccactgcactccggcgtgggcaacagagtgagactcagtcttaaaaaaaaaattaaaagggaataataatagcatctatattacagggctggagcttaaataggcaatctatgtaatgcgcttagaacagtactaagcacatgtacgcattagcttttgttattaccaaaatcatcagtgttatcctcagctcatggggtggcccgaggggtcactgaggtgctgtgtgggaagcacttagcacagggaccggctctagtgagtgctcaggaaatggcagctgctgttctggcatctgtgaccttcctctgtcctattacgactgctgttcatgaaccccggtggacagggccagggagaggctgcagaggcgcccgctgactgctagaagtctctctggagtgccggggcccctggcctggtgctgcagacagggatggggttgacaaggtggccggtgtgtgtccccctcacctgcatgccctccatcctttctcctacccagcgctgcctagactggaaccgtgacatcctcaagaaggagctgggactgacagagcaggacatcattgacctgcccgctctgttcaagatggacgaggaccaccgtgccagagccttcttcccaaacatggtgaggccctgcagaccccaaccctcgccccatgccagtacagggcagccagatccagaaggacccctcagctgaagctgtccaatggggaggcccaggtcccaatcctggctgagctgctgtgtgacctcacctcaggcacttgccctctctgggcctccatttcctcctaggagtgatatgctcatcctagctgcttcactgggatactgggaacccttttccttaacagataggaaagtgctgtgcaaaagattagaagtcctttatgtacaggagggatttctgttacatagaggggagtcttctataacataaaaagaggttagaacaatacatatgcacacatggacacatatatacacacatgagcacacataaacacatgtgcatgcatggacacatatatacacacacatgcacacagaaacacacatgcacgcatgaacatatatacacacatgcacacacagaaatacacatgcacacataaatgcatacatacccatacgtgtgtgcacattcatacacatgtacatgtacacactgatgcatgcatatatagccacatatacatacatgtacagacatatgtgaatgcttttgcacacacatacatacagaggcagattgcctggttttccacttcagctctgccatttgtgagtgacttagccccactccgtccctatccaatcacagttactacttcacagggttgccgtgagggttccatgagcttaggataggcatgtgtgtactaggtgctcactaaatggaagctgttgccatcgcaatcccccgtcacaggtgaacatgatcgtgctggacaaggacctgggcatccccaagccattcgggccacaggttgaggaggaatgctgcctggagatgcacgtgcgtggcctcctggagcccctgggcctcgaatgcaccttcatcgacgacatttctgcctaccacaaatttctgggggaagtccactgtggcaccaacgtccgcaggaagcccttcaccttcaagtggtggcacatggtgccctgacctgccaggggccctggcgtttgcctccttcgcttagttctccagaccctccctcacacgcccagagccttctgctgacatggactggacagccccgctgggagacctttgggacgtggggtggaatttggggtatctgtgccttgccctccctgagaggggcctcagtgtcctctgaagccatccccagtgagcctcgactctgtccctgctgaaaatagctgggccagtgtctctgtagccctgacataaggaacagaacacaacaaaacacagcaaaccatgtgcccaaactgctccccaaagaattttgagtctctaatctgacactgaatgaggggagaagggaaggagattctgggattgccagttcttccagcagccatgctctgaaaatcaaggtagaatccatggaaagggaccccaggaccccgggaccctagacgtatcttgaactgccatcgtcatttcaaatacatctccctcagggtttccaggtggccacccccaattattcattccttaccaacctctcaaatcctcttggctttctctctgcagtgtggacactgttggctagtcctccccactccctgagggtccagtaagttagcttagaaccttcctggaaacatttcatctgagcaggtttccccacgtgtgggatgctccttttgcctcatctgtctcagggatgcaggctcccccgcatgcatggggatttctccccagaccagcatacttgtgacctgagagttcaatgcgtaaagatgcccctggtcagccatatccatcttctcttgcctggtccttgattctctggccgctccctgaccttcctccttccactgccttgactttcttcctttttattcctggtgccatctgtccaggcagctagacaagaacttgttcgccagcagccagattcaggccttcccaggggcataataagtgaccagcccctcctctccggacatcagatccaacacataaggaccctggcctaccctccagcccaacagccagttctgggtcagctgccaacttaggggtggtttgattatcccattgaaattcaccagtgcctttgccaaagaccctctcatttggacatacccagattcattccctggctccaactgaaaagactcagtttcaatcgttaaaagttcctttagggccagaagaataaatgaattataatcccattttgaagaaccgatttataaccaatgaaaaggttataatgtaatttatattcttggaggaacaagattttcatttgggattatttccttcaaccattcaacaaacatttgttgtatgccactaagcgccaggcacggcgttgggctctgcaaacacagtggttagtagcagtctggacctggtccctactggcatggaacccatcactccccaacatgcaaagcccacatttaaaggccagcctctgccccttcagtgatgcgctctttagaaatgccagtccactatattcagaaatccgcagggcacaaaacttccagcaagtcactgttgtggtgaaatgggcagtgggggtggggggtcttctttaaacaggcccccttcccatctacctagccagtacccatccaatgagtccccagagcctccagaagctgttgtctcctctctggggacagcagctcctgcctttggaggccaaagccccagatctctccagccccagagctgaaaacaccaagtgcctatttgagggtgtctgtctggagacttagagtttgtcatgtgtgtgtgtgtgtttggttaatgtgggtttatgggttttctttcttttttttctttttttttttagtctacattagggggaagtgagcgcctcccatgtgcagacagtgtgtctttatagatttttctaaggctttccccaatgatgtcggtaatttctgatgtttctgaagttcccaggactcacacacccgttcccatctcacttgcccacccagtgtgacaaccctcggtgtggatatacccccgtggactcatggctcttccccacccccactttctataaatgtaggcctagaatacgcttctctgttgcaaaactcagctaagttcctgcttccaccttgatgttgaaatatcttatgtaagagggcaggggatgtcgtgaagatggcaagaagaacacagtttcaaatttctggaaaagagcctgtggtggagatctaaagatgtttagggaagagctcgactaaagaacaatgaaataaatggtccaaggggaagtcatatggctgttggtgtgatgttctttgctgcttcatagacacggcctggagtgaggcaagccacacactgggccctcctggtcctgcagcccttgctgttctgggcacagggtctgggctctcagcataggtatcttgagggttcggaatccccaacacactcagcaactgcatattacatggccaccaccgaaggtcaagaccagtacccgcaataaagtctgactatgttgttctgatggggttccccaggagcagagcctgagatgagcattcaggaacaagtgatttattgagaagtggccggcgcagtggctcatgcctgtaacctcagcactttgggaggccaaggcaggaggatcccttgagcccaagagttccataccagcttaggcaacatagtgagacccccatctctataaaaaatttaaaaaattagctgggcatggtggcacatgcctgtagtcccagctacttggggggaggctgaggcaagaggatcaactgagcctaggacatggagtctgcagggagccacgatcgtcccactgcactacattccaacccacatgatagagcaagaccctgtctcaaaaaaaaaaaaaaaaaaggagcctccggggaaaccaagatggtaactgggggagcaggccaaggaaagggaagaaaccatacaagagtgtgaggtgaagcctcagaccgatccctggagagctctggagcataaatggcacctctgagctgtcctgtctggaggctgagtctttgtccgcctgcaccagtcattggctctggggactctggccctctgaatgggcgagggggcaccaggagctcataggcaaccatctaaagatcacagctgggattaggaacaaagtcacaagcttgtgacaagttctgccgcaaccagaagagggaaccgcaaccacggcagggaatcagccttgtccattgctctgggtgatgtcgtgtccttttaatcaacagctactacacacaagtatttgtgatttgacccatggtatgaaaatccatacaacataaccatgatctaacagggtctttgtgaacaaactcctgaggccctaaaatggagtcacctgattggttgctgagtctagaagctgcttccaagttctttgggagacacctggggcccttctcactccttagtcccatcttgagcttctggaccaatgtcttggtgccactattttaaaggggccactgcaaaatgagaatcactggttcactcactcccaggcttaacccaggggcccaggcctctgaaatcccctttttttggttttgttttgttgtttttttgagacggagtcttgctctgtcaccagactggagagtgcagtagcatgatcttggctcactgccacctccggctccctggttcaagtgattctcctgcctcagcctccagagtagctgggattataggcaagcaccaccatgcccagctaatttttgtatttttagtagaaacggggtttcatcatgttggccaggatggtctcgatctcctgaccttgtgatccacccacctcggcctcccaaaatgctgggattataggcgtgagccagcaccctaccgaaatcctcttttatacccaactaatgtggtccaagccactgcaaggccaatctttcatagatttcctgacccatctagttctgcaattccccaagggatgctgggatgttcaacaagttcatcctggtgatgttttcacatcttggccaatcacccacctcagggtcgctgagtgttaccttgagacttttgaacagcactttccaatagaaatataatgcaaactacataatgtgattttgaattccctagtagccacatttaaaaagtaaaatgcaggtgaaattaattttaataatatattttctttagcccaatctatccaaataattatcatttcaacatgtaatctaaagtgtaaaatttcaatgagatattttacattctcattttttggtagtaagtctttgaaatctaatgtgtattctatacttatatcacacatctattcagactagccacattttaagtgctcaatagctacaagtggctatcatattggaaggtattgttctagaaacttgtctgccaggctgagcgccaattgtggaaataggcacattccttaaacccccagagtccactagtttgactgcaatggttaataaaagtttattattattatattgaaaagagaaatgtaaaatagatacgagccatcactggccttggtatgcagacccttgcccttccagaaagtcttcttgtctgaaccatggctgctgccaagttaccaggacccccctctctctctgcaaggtgattgcctttggccaggtcccctctgcccactgtcaagatgggaacccccaccaggtcctctttttcccctcactcttcctgtggatacagcctggttctacatttaatctaaaatgtgtacttggagtcccaggtgagagcagctcgttatctcagattcctccggcattccagatgggatcagagccacaccttggcatagccaaaaccccacggaagtggttggggggaggtctctcctccgaaacaaaaagcagccaggaatgaatctgcctctccagtgagattcatgtaggatcctcaagcaagtggtatcaggtccaaggggctgatggaaaagttattagcaactaaatataggagtgacatcaaatggcagcatgtaggatcccttctccagctggacatgcagaaaaagaatgctcccagacagaaagcccagctctgcagccttgtctcaagcctggctgatgtgaaagaccttcaccccatccccctggccagctgggctctttttcagccctgatctttgaaaaagcaaaggtcttctctgggtagtctctaagcaaactgctgggttcaggccacgccagcttggcctcaatccctcaccttccacaagcaaaggtctgctttctgacagccctggttatacccaaagatgactaacagtctctgaccagcatgctaaggccccatgcgcaggctactgtgttactgaagagctgaagagatacgttcaatctttaaaaggaatgttttccggccagctacagtgactcatgcctgtaatcccagcactttgggaggccaaggcgggcagatcacctaaggtcaggagttcgagaccagcctggccaatatggtgaaacccagtctctactaaaatacaaaaattagccaggtgtgatggcgagcacctgtaatcccagctactcagtaggctgaggcaggagaatcgcttgagctctggaggcagaggttgtagtgagccgagattgcaccactgcactccagcctgggggacagagcgagactccatcccaaaaaacaaaaaaaaaagggaatattttgttttcctactgatggcaattcctggcacatagttgatgctcagcaaatgtgttttgaataaaagaaggaaacatctgttcagctaggcaatggaagcagaaaagtcagcccaaacatttcttaaacattgattgcattcctaccaggtggaactatatggaatcccatttggaaggtcaaaatggtcaaatagaggcgatttttgttggttcaacctaatgctttgcattcgtcatctcatctaattctcaaaactaagctgtgaggttgttatccccaccttacagatgaggaaactgaagctcagagacaggaagtgacttgctcaagattactcagcaggaaatggcagagctgggattcatacctgggtggtctggctccggagcccacccactgagcgcctgctcttgactacatctcagaaacagctttctagccgggcgccatggctcatgcctataatcccagcactttgggaggccaaggtggacagatcacttgaggtcaggagttcaagaccagcctggccaacatgacaaaaccccgtctctactaaaaatacaaaaattagccaggcgcggtggcacacatctataatcccagctaatagagaggctaaagcaggagaatcacttgaacccaggaggcagaggttgcagtgagccaaggtcatgccactgcactgcagcctgggcaacagaacaagacactgtctcaaaagaaaaaaaaagaaaagaaaaaagaaacagctttctaacccaagtttagcattctttcattcacaaatgttaccttatctttgcaccagtttttagcatgtcaggtgtcctattagaagaatcttatcaacaagatatcccctctacctgcaagcaagatgtctggagattataggattcctacaaacccctctaaggcaataaggcccataatgaaatgacctctacgtagctcagtatgtgctctctctattcctcagctcggagtaagatggcatgtctaaatcgtgaaaagcaaattatattcattcatccatccattcacttttctccattaacatttgccaagtgtctactgtgtgtaaaaccagtgatcccacaatttttcatctaaaccagggcacttctgagatctcagaggagccctgcaaataattccatcagggcaacagaagaatccggaactatgctcggcaaaccagggtgtttgttctccctggaaagccctgtgcatgagacatgatctaatccctcaaggagctgacagctgagtcagggagacagacaggagagcagagaggcacactgatggaataggcacctgataaatacttgctgaatggaggaatgaataaggtacaaaaatctgtgtacacacacacacacctttcctgctgggagaatgaccaaggatggcctggtgttcatttgtcctaagatgaatgactgctgagtgaatgtagaaatgaatgattaggcaaagaggggaggaggggttgccaagctgagtagagacacaaagaggtccaggtgtgtaatatgtctgggaaattgtgattatagtgagtagctaaaatatagattgcagtaatgctggaaacactagggttggtgccctggaaaccgtctgaaggtttgaggtcactgcggtcacatgatcaatcctgtattttaggaagctgacagtaacatatttcttcactgatattaaactcatagggaaaacatttttaagaaatttcctgagggataagcaaaccatggtacagccctgcttttaaatattctgcagcatatatgatgagacggatctatgcatactaacatggaaagacctccaagacacagcacttgacgaaaaaatggcagcttgcagaacatgtatgttatcgtttgtattttctaaaaataaaaatggccgggtacagtgtctcacacctctaatcccagcattttgggaggctgaggcaggcagatcacaaggtcggcagatcacaaggtcagcagttcgagaacagcctggccaacatggtgaaaccccgtctctactaaaaatacaaaaattagccgggtgtggtggcacacacctgtaattccagctactcaggaggctgaggcaggggaatcgcttgaaccaggaggcggaggttgcagtgagccgagattgcaccactgcactccagcctggagacagagcaagactccatctaaaaataaaataaaataaaatagaaaaataacagcaagcaaagccatggatttctgtagaaacatacatatgtaaatacatacaaagaaaaaaatctggaagcaatcccatgaaactgacaatagcaatcacccctgggaaaggaagtgtgactgaggggatttaagctttatctatattgcttgaaatttttacatagtgagaatttaattacatatgtacagtattctaaaataattttttagagctgcctgaaatccttgacattgtatgtatgctgaagtcttcccattctgataagcataatctatttcccctaataaggcacagttatcttttacctctttcctttccccagctgggctctccactaccaatttaagattgatggctccctatagacactaactcatttaattctcctccctgcaaggcgactgtttctttttcaccgtcttacacaataggaaatgaatgcacaaagaggttaaggaacttgctcaagatcacagagcaaatggctgatataacagggtttcagacccctaaaggcctgcacacttaaccattctacctaccagcctccctaagaggtcaaattgcctttaacgttctgcagctctctgacttttgtttccagtcggctggcatctcgccgctacgcatgaatatttacccactattcgtatttgcatttcatttgcatggctgtgtctctgacagaaaacagtgctcaaaagccagattcggctggaaagggcgtttgatcatggcattatacggtgtttgcaaagtgctcacccacacacatccagaggaacaaactaactgctcatttgagagtatgctggtgacggcaggcatctgggaatgaggcagaagttagcagggtgggtgagctccaaatgtatgtgtgtgtgtgctgctatagggccagcagcatgacagtccccagaaggccttggaccacttgctaagtcccagcagctgagctgacttcagctgtgtgaaacgcagccccatctggagtgggggtggctcatgacttttttgctccgggagttccatagaggctgctcttgaaattggagaagcctgtagcctatgattgtccccatcccactcgaagagaatattttgagaagtctaattatatggtggggtttgcatgggatgagggaagagagtttagataaggcctttctaagggcaggttggcaaggtccagtagggagccctgggtagttctgtgaggcagcagcaccctctgtgggtagaccagaatggctgcaaccaccatgttcccacgagccttaggcgcacgcctgcagcccagcccatctacctaacagaagaggctgacctacttgctgggtgacctgcggtgagttgttgacactctctgaggctcagttgcatcaactgtaaatgaagaatagtaatccctactttgtgccgttgctgaaatgattacagagaggacatgtacccaaagtgttctgcataggacctggtacacagtaccaaatgtgtcctccaaatgtggcagttaccatcattagtcaccccaatagccccatgacccttagtatagatgaccaccgagtgccctagcataagggacaaggcttctctgagaaaaatcatagatgggactggggtgggggctagaaaggatctgtgccgctggctggttgacgttttgatttgccaattccgtctattccaattctgggagtccttgacatcggtcatgggaggctctgacaataaatacgttcataaagaattaaaaacagcccaggcgcagatgcacagtcctgtaatcccagcactttgggaggcaggaggattgcttgagcccaggaattcaagaccagtctgggtaacatagggagactccgtctctacaaaaaaaaaaaaaaaaaaacttttttttttttttcagacagagccttgctctgtcgcccaggctggagtgcagtggcacgatctcagctcattgcaacctcagcctcctacgttcaagcaattctcttgcctcagcctcccgagtagctgggattacaggctcccaccaccacacccggctaatttttgtatttttagtagagacgggtttcaccatgttggccaggctggtctcgaactcctgacctcaagtgatccacctgcctcggcctcccaaagtgctgggattacaggcacaagccactgagcccagcctacaaaattctttttaaaagtagctgggcatggtggtgcatgcctgtggtcccagctactagggaggctgaggtgggaggatcacttaagcactggagtgcgaggctgcagtgagccatgatcatgccacagcacttaaacctgggtgacagagcaagactctgtttcaaaaaaaaaaagaattaaaaacaaacttgcagatagcaataagttatatgaagaaaatcaaatagagtcaagtgggtcaagccctcaaattgcccatagtctggggaggcagacatattcatgggtcattgttaaaacaggtgttgcatgcatggatggcatatgcagaggatattttgatagggacaatcaaggagggacttcctaagggaggaaaaagttggagctgaatcttcaatgatgacaagtcaaccacatgaaggaggaggaaaggacactccagatccaagacacggacgtacgcaaaggcttggaggtgtgaaatgaggcggggaatagagcaggctgtattacagggacagaagtaactggaagggcccgcgggggagccggggagccttggagctatggtgggagttgatggttgattggatatggggtggggagaagaatcaagatgacatcgagtttctggcttggatatccggtagatggtggtgctaataagacaagtataaactcctcaggtgagatgtaccgtttgggataggttgggtttaaaggaccattgggacgcccagatggagatgctcaggagacagccagggagacggaaaggacgaagcccactggccaaaggcaaataaaatcctaaattttggctgggcgcagtggctcatgcctgtaatctcagcactttgggagtccgaggcgggtggatcacgaggtcaggagatcgagactgtcctggctaatacagtgaaaccccatctctactaaacaaaatacaaaaaattagccgtgcgtggtgacaggtgcctgtagtcccagctactcgggaggctgaggcaggagaatggcgtgaacccgggaggaagagcttgcagtgagccgagatcgtgccactgctctccagactgggcaacagagtgaggctccatctcaaaagaaaaaaaaaatcctaaattttagatgagaaggccccagagctccaccacagcaatctgttgctgtgggtttttcccagaggcaaatgaatctcccaggcaacatctgatatttcctcctaaatccaaccctccttcaccctctggctggcagaaatcatccaggttgccctaaattacaagacaccagactacaattgattgtacaaatgacagttgatacaacataatgcttttttattttgttattttcatttttttgagacaggttcttgctctgttgcccaggctggagttgcagtggtgtgatcacagctcactgcagcctcgacctcctgcactcaagcaatcctcccacttcagcctcccaagtagctggtactacaggtttgcaccaccatgcttggcggattttaaatttttttgtagagacagggtctcaccatgttgcccaggctggtctcgaactcctgggctcaagggatcgatcctcccacttcagcctcccaaagttctgggattacaggtatgagccactttgcccagctggttttaattttcaattctggacatgatttccagctcttaggggagaaagacctcctaaagcaaaacgctcacctaaggctgctcagttttcctgctgtccaaagactgagagagtctggaaaacaggagcagcttttccaacccaaaagtgtggttatgaggactaaatgagactgtttatgtaaacacctttgcaagtgataaagttcagtataaacatagtgtctagcagactgtctggtgaaaagcaatatgtcactctctagacgaatggaaataaaccaaaaaaacctagggtcttatcatgaggacatctttggaaaatatgtcaggatcaggccatgaaaatttctaagtccttctgcagctgtgactttctggcatcccaaagtccagggcggaggtacagccgcccaggaatttattcctccataactttgagctccccaaatccccacgaagcccaggaatgatgtgactgcagggcatgtgggcccattggcaccaacagcccctccataaatcaaggtctcacttatgctggcctcagactgctttttccaaggtgacctgggcaaactgaaagggtagttgcttatctaggggtggcatctgcctttgagatgaaagaaccctgaaaatgctaagaggaccaattctctagaaatacattcctttcaggaagagctttcttcagctcagacgacaattcagttaggagttagagacagagcggcagtcttcccatatctcagccagtttgggtgacccaagaggccccatggggcagaccagaggggccctgttccagtcctgggtcagcaccagtgaaagtcaaggtgacctcagcattgttaccagttatccacaagacagccacgtgaatcacagaatcttaaatcagagggcccaacaccctaatggttcaggcaaggaaactataggtcaaagatggggaggggcttatccaaggtcacatggccttgaagagaatattccaggttagacctagaggttcaggcctcactacacaccccctttaatgaggccacactggcggtatagcggggttccagtcaaggactccagaaacagcccatccagccaattgacctggccatctcaatgtctccagtagcatccacatcagctgtgagagtggaaaccaaagactatagaaaggcgcccttcacatgtccaaaacaagcagacagaaaggggaaaaaaaaatcactcctacgaaaccccgggacctgcaaggttaacaatctacacaaacgcgtggagtgactgaagaggcaggtgccttggaggctccaggccactcctgcccaaggtaagtcccaagagtgaggccagctctgagcagatccatggagggggctggaaaaagaagctgagatgtctaaaatggaaactcagtaaaaaacaaaaccaaaaaactttcttcacagaactgctgtggggattaagtgggataatggaccataatgtttggcacagagtagaaatggtttcttatattaaatggctaacaaagccaccaaggactgggtgtccttctctgggcacaccctctcgtacagaacagagctcacagtgtctagctgtctgctcacttgccgtctccaccactagagagtaaattcaatgagcagtgaccacctggcttgctcattccctgcagcatcccagcacttggtgcctgccacatagtagccactccattcgtatttatgaatgaatgaatgaacgaacaaaagaatggcacctttgccagccacccttgaaatcacctcagctcattcaccaactgcccagtttgtttgggactctcagtgcagaaacctgggcagcctcgggcaagctgcacggtatgcgacagaaagggctgactcaagccagtaagcgtcagagatgaataataagactgacaaattcttagggaggctaggtgtggtggctcacgcctgtaatcccagcactttgggaagttggagcaggatgattgcttgagcccagcctgggcaacatagccagactccatctctacaaataattttttaaaaaaattatccgggtggccgggcgcggtggctcatgcctgtaattccagtactttgggaggccgaggtgggtggctcacgaggtcaggagttcaagaccagcctggccaagatggtgaaaccccatctctactaaaaacacaaaaaaattagccgggcatgatggcggacgcctataatcccagctactcgggaggctgaggcagggaattgcttgaacccgggaggcggaggttgcagtcagccgagatcgcgccactgcactccagcctgggagacagagcgatactccatctcaaaaaaaagaaaaaaaaaaaaactacccgggtatggtggctcacacgcctgtagtcccagctactctggaggtgggaggatcgcttgagcctgggaagtcgaggctgcagtgagccaagactgcacaccggcctgggcaacagagtgagaccctgtctgaaaaaaaaaaaaaaaattggccgggcgcagtggctcatgcctgtaattccagcactttgggaggccaaggtgggcggatcacgaggtcaggagttcaagaccagtctggccaagatgatgaaaccccgtctctactaaaaatacaaaaaattagccgggtgtgatggtgtgcgcctgtaatcccagctactcgggaggctgaggcaggagaatcgcgtgaacccgggaggcggaggttgcagtgagccaagatcgcgccattgcactccagcccgggaaacagtgcgagactccatctcaaacaaacaaacaaaaattccaggaataaagaggttgaaatcggggcagggacccggataggatggctccgccccatctaagtcttagccccaccccctgaaagtcgccctgcctctcagactcctcccctttctgagaaggtcacgggggaagccaaatgggcatgcgccgctactgcgctattgcgcacgctcgctgtgcttgccccgccttccctccgcccacccgggaaaccggaagccgcctcccacttggttgctcgtacgcggctagtgggtcctcagtggatgtaggctgggcgccgcgatgttcgacgggacaccggcggagagcgacctcggggttaaggggtggggctgacgtcaggagccaagatggcggcggtggtcgccctctccttgaggcgccggttgccggccacaacccttggcggagcctgcctgcaggtgagtcctggagcctcagagagggaaaagtcaggaaagccacagagactgcctggagctgatggggctgcggagagactgaggaagcatagggcaaggcctcagggagatggaggacctcctccccctggtgcagtgctttggtttggcttcgagcatccctgtcaagttatctttctgcgcctcgcagcagcttgtgagttagggcacgggcaattttttacagctaagggtgcgggggggggggacgttcagaaaggggacttgaattgctcaaggtcacatggcaagcgaatgactgctggaaccagaatttgaatccagacattggagttccaagccctttttctgccaccaaactatcgcctctgtagaaaagggagacctgcggggtgtgaaggatgggaattgggaagcgaggtaattcctcaagggtgcgaggttgaggaccgggatgggtgaggaaaggacatgtgaattgttggggacagggcaggggaagggagagatggagggaaatgcacccagccccctacctcgaaggatcccggaggtgggtggtgggggttgcaggaaagactgggttccttaaagcagtgtcaccacagtttcactagtatcctctcagtgtttctgactctaaaggtcatataataatacggacctcatagagttgacatggaatgacaggtagagggcttggcgctgttcttgtttattactatgccgtgtgcagtaacagattttcccacgccccttgtatggccaagaaacaacacatttctgacctgccttctaagtgggaacatttagaaggggaagggaaattgcttttgtatacataagggactaaggatttgcaaatcctttctaagtctgttcctcttctgggattctcaacaacccctttaaggtgggcaagcaagaatccttaccctcctttttggagctttgaaaacttgaggcccccagaaagaaaatttttggcttgctcaaaatatcacattcccaagaagcagacctgaggcagttttttaacatggtaccagaaaaactccttagcatagatcttgggacatggttggtgtccaagaaattttagttcctcttcctctcttgcacttaaatgaggacatctttcatcttaagtgcctgctatggctgcataacacagtacatattgcccatgttccaatcctggttctatccagcatgctgtgtgtgaacttggatccactctgtctgcatcagcctttctgaaaaggggagatagaggaagaagacagcctaccagagcctcaagctgacatcctctcagtattaaattgatgattgataatgagcttgtttacctgttccttttatagttgctgagcaaacaattaaattgtgagagccccactaacgagagagttccaagcccctcttctaagaatgcattgtagaaaaggctaatttcataggtcatttttgtaattccaggcaaggtctttgcagggcctcctgagggcaacagaaaatagaagagccccaaggcctccccttccttgtgggaatgtacatgtatacccacaaaagccacctcaaaagaattcagtaatgagcttggtgtgttacctgtgggtaacattcaggttcaggttctgaattctttttatgcttatagtctgaccactgaaccacaattctgcctgtaagtatttgactgtagtatattaactattgtttgtgttgccttatttcttcatctggactatgaactcctttaggacaagaactacctacttaaaagtgtgtatcttgccaggtgcagtggctcatgcctgtaattccagcactttgggaggccaaggtgggtggatcacctgaggtcaggagttcaagaccagcccggccaacatggtgaaaccccgtctctactaaaaaaataaaaaaaaaattagctgggcgtggtggtgggcgcctataatcctagctacacaggaggctgaggcaggagaattgcttgaacctgggaggtggagggtgcagtgagctgaaatcgcaccattgcactccatcctgggcgacaagagcgaaactcagtctcaaaaaaaaaaaaaaaatttaaaaaatgtgcatcttgttccttaggctggcagggctaggatacctatttacaaatcagaataatacaaagactgataaggttgccaatcttgtagagcaaaaatttttttctgggctatgctagaaacttgaccccccctcccccgggttatcttatgaggcagatattaatactacccaccctttacaaaggaagaaatagaatccgaaaagctaataatttgcagaagaatacacagcttgtaagtgatagagcttggatttcaagcatcaccaatcacacttttcagcaagcctgcaccttgtattttactcaggcttatcttcatacagtcctttttgctttcttcctctctatttccccaccttcttctctggcctccaaatctttatccactccatccaactccaagcctgcaccctaaggacactttactggaggaacaacaaccagccttcagcaccattcagaattcacccttctcagttcagttgttgcttaccttgcttaaattataaactatgaaattcatactatccaagatttcctaggaatgtactttctgccttgaatactcattagtctttagattaacgtaaaaatgctttcaaggggccctctttccttttggatttgtagtataaattgctgggcaggtaacaaggggaaaaaaatcatatagtctcattgtatgattagagcaacaacttcttttgttccttggatctcattgtgaaatggaattatctttttgcactgttgcgttttatgtttgcgttttcaccactggttataatggctaaaaggttggatttttgaatcaagtgacctgtgttgctatatgatcctatcctcgtcttttaactgggaacaacaaaacatttttcatagagatgttataaagattagagattatttggcaccgtgtgtgacagattataaaggttcgatgaatgaaatctggcaaatttttagatatatgtattcaacgaattttttggtggaacacagataacataatcctgagaattaactctttgtacagacctcaagatgagcaaagctctatcactttcagaaccatgaccactctggtgattttgatttcagaatcttctttcattctggtaaaccccctttgccccaccaaatattgtatgaaatacatttttttttttttttgagacagagtcacgctcacgttgttgcccaggatggagtgcagtggcggaatcttggctcaccgtaccctccgcctcccggatttcaagcaattctcctgcctcggcctcccaagtagctgagattacaggtgcccgccatcgtgcctgtctaatttttttgtatttttagtagagacggggtttcaccgtgttggccaggctgatctcgaactcctgacctcaggtaatccacctgcctcggcctcccaaagtactgggattacaggcatgagccaccacgcctggcctataaaatacatttttgacacaaaacaaatttaaattagttgtactgaaaaaaaaaaaatgatgacattttggggcactccaaaactgatgttgggatatgtcgacttagatattcagtgtagtacatcctggcattgctcttatttcacatcattcatatgataagactttttaaaaatttaaattagctctaatacaaacttagtctcttttggaaagataatacgtgatcaattatccgtgtagagtggatatgaaacagatatttaaatgttataaagaaatgttgaagggaaaacctcattgcaggtaaccacagtcatcccacaggccttgtggttctgatacccagcttgatagagcctaatgcctgttgcccactgacaatactaaatcaggctttagaactagggggttatgcctggcacagtggctcacacctgtatgtaatccagcactttgggaggctgaggcaggtggatcacgacatcaggagttcaagaccatcctggctaaaacggtgaaaccccatccctactaaaaatacaaaaaagttagccgggcgtgtgacacgcgcctgtaatcccagctacttgggaggctgaggcaggagaattgcttgaacccaggaggcagagagatctcgccactccactccagcctgggtgacagagtgagactgtctcacaaaaaaaaaaaaaaaaaaaaaaaaaaaaaagaactaggggattatgctccagtcccagattctgtttaaagcccggttaggggccaggcgcggttgctcacacctgtaatcccaacactttggaacgctgaggcaggtggatcacttgaggccaggagtttgagcccagcctggccaaatggcaaaaccttgtctgtactaaaaatacaaaaattagctggactttatggcacatgcctgtaatcccagctacccgggtggctgagacaggagaattgcatgagcctgaggggtggaggttgcagcgatccaagatcgcgccactgcactccagcctgagcaacagaatgagactctccaaaaaagaaaaaaaaaagtccaagttagggccagacacaatggctcacacctgtaatcccaacactttgggaggctgagatgggaggattgcttaagcccagaaattccataccagcttagccaacatggcaagaccctgtctctacaaaaattagctggacatgatggtgtgcacctatagtcccagctacttgggaggctgagtcaggatgatcgcctgagcccaggagttaaaggctgcagtgagccatgatctccagcctgggcaataaagctagaccatgtgtctataaaaataaaaaataaaggccgggcaaggtggcctgtacctataatcccagcactttgggaggccaaggcaggcggatcacctgaggtcaggagttcaagaccagcctggccaacatggtgaaaccccgtctctactaaaaatataaaaattagctcggcgtggtggcaggcacctgtagtcccagctactcaggaggctgaggcagaagaatcacttgaagtcgggaggtggaggttgcagtgagccgagatcgcgccattgtactccagcctgggggacaagagtgagaccccatctcaaaataaataaataaataaatattttaaaaaataaatgaaaaataaaagtgtccaaattagaagtaaaaacttgaagtagccccattttttaaaaggcatattgtcccacttaccctactatctgcctcaggcacagcagccacccactctggaaaatagttttgtcagttgcttaaaaaaaactaaacttgtagctaccatacagcccaacaattacacacctgggtgtttatcctgagaaatgaagatgtaacgttcacacagaaatttgtccacaaatgttcatctcagctttattcatgtcaccaaaaattagaacacccccaatgtccctcagtagttacatggttaagcaaattgtggtacatgataccttggagtgctactcagctataacaagaaaaaagctattgctgtacacagcaacttggatgaatctccggagaattcggctgaataaaaaaagccaattccaaaaggctacataccagatgattatattgatataacattcttgaaatgaccgaatttgagaagtagagaacagattagtgattgctagggcttacggagtacaggggaggtagggtgggaggaagtggacagggctataaaagggcaatgttagtgatcctgtgcttatgggaatgtcccctatcttgactagcactgtcagtattctggttgtgctggtgtgctacagtttgcaagatgttcctgttggggagactgggtaaagagtatgtgggccctggcatggtggctcatgcctatatcccaactcttcgggagggccaggcagaggatcacttggggccaggagttcaagaccagcctaggcaacacagtgagacccctatctctacaaaaataaatgtaaaaaaactaactgggcatggtggcgcatgcctgtagtcctagctactggggaagctgagatgggaggatcgcttgagtccagaaggttgaggctgcagtgagctgtgatcatgccactgcacaatcagtgacagagcaaaactctctctcttttttttttttttttagcttgagtttcactttgtcacccagggtggtatacagtggcacagtcttagctcactgcaacctttacctcccaagttcaagccattctcctgcctcagcctccctagtagctgggattacaggcacacgccaccacaccctgctaattcgtttttttgtatttttagtagggacggggtttcaccatgttggctgggctggtcttgaatccctgatctcaggtgatttcccaacctcagcctcccaaagtgctgggattacaggtgagaagagtatgtggagtctcagtattattttcttctttttgttttgttttgtttctttgaaacagcgtctcactctgtcacccaggctggagtgcagtggcgcaatcttggctcactgcaatctccgtctcccagggtcaagcgattctcctgcctctgcctcccgagtagctgggattacagacatgtgccaccacaccgggctaatttttgtatctttagtagagacggagtttcaccatgttggccaggctggtcttgaactcctgacctcaagtgattcgtctgtcttggcctcccaaagtactgggatacaggtgtgagccactgcacctggcctcagtattattttctataaatgcatatgaatctataattattaaaaaataaaaaggttggccaggcacggtggctcacgcctgtaatcctagcagtttgggaggccaaggcaggcagatcacctgaggttgggagtttgagactaccctgaccaacatagacaaaccacatctctactaaaaatacaaaattagccgggcctggtagcacatgcctgtaatcccagctactcgggagactgaggcaggagaattgcttgaaccggggaggcggaggttgtggtgagccaagattgcaccattgcactccagcctgggcaacaagagcaaaactcagtctcaaagataaataaataaataaatagtttaattttttaaaaaagcatttaactatggttatatgcagtaacatatgaatctcagaagcattatgttgagtgaaagaagctagacatgagactacgtaccgtatgatgccatttatatgaattctgtaaaaggcagactcgtgatgatagctgatcagttgctaagggtaggaaaaggggacttatgtttgccatcaagggcacaaaagacctttttggatggaaatactctgttgtaattgtggtaggattacattgctttgtcaaaactcattatacccttaaaattagtgaattttattataatgaattataccttattaaatctcacagaaaaaagaccaaaaaaaaaatgggacattaagcaagcaaagtccactggagttgataccttcaggaatctttcctctcacttcctcccaaataccacaaggtggcattagatgttcatgtcagtttacaaaatggggttcccggtgaaaaacatttgtagaaatggctttccttttgttgatgattttagccagcttggtgataaggtaaaacatagctttcatcttaactttcattttcttcatatattttcttcttttctactgttagctgatgtttgtattttcagcttcagttaatacgggacactttaccaagaaataatgttactggtagacggtcttgaccacaagtcgtcaaggtttttagcatgttgaacaaaaaattggacaaaacacacaagcaaagcaacagaagacgaaagcatagatttattgaaatgaaagtacactccatagagtaggagtgggattgagcaagtggttcaagagccccagctgcacagtcttctgggattaaagtaccctgtacgggtttcctattagttacaccctatgcaaatgaagacttggcccgagacgaatcagaggctgtagtgaagactccctgtctctaaaccctgttctcctgcctcagtaataaacaccactgcatctttttgtaattagtcaattaaccttccgagtttttacttttctatatcagtttattttaaaaattagcagtcctggagtatagtcttttctttctttttttcttttttattttgtatttttgaaaaagagtctcactctgttgcccaggctagagtgcagtggcatgatcttggctcactgcagcctcaacctctcgggcccaagcagtcctcccacttctgcctcctgagacgcacactacgacacccagctaatttttttattttttgtagagatggggttttgccatgtttcccagactgctctcaaactcatgggctcaagcaattctctcacttctgcctcccaaagtgctgagactgcaggcatgagccaccaccctcagaccacaccccacactccttccccttaattctggtttgtcaagcctccacttagatgacatgtgaggaagccttctctgactcttcactcattgaagtctctgctgtattcatccagagctccctgtactttcccaacagtatcgctctttatattcatcgtgaatgtttaatttaactcttgttcactacaaagtaagttctgtgaagatgaaggtttttgtgtattaagtgctgtgtcactagcccctaataccatgtctgatatattagcatatgataggtgcttaatacttgttggatattgaatgcctgccttttctaagaagattatgtgtcagtaatgtgtgagtttatatccagcgttacatctgttgtgccagcaaaatggaattatcttgtatttctaatttttttttcctttttgtgaactttaaaaaatttcaggcctcccgaggagcccagacagctgcagccacagctccccgtatcaagaaatttgccatctatcgatgggacccagacaaggctggagacaaacctcatatgcagacttatgaagttgaccttaataagtgagtatctctgtgaaagccagctattgaaggagagttcttgatttgatttagggacatgcttttcacatccttggaaggcttaaaaatctgagatcatccgatggctctgtttttaaaacaagaatgagcttgggccgggcacggtggctcacgcctataatcccagcactttgggaggctcaggcgggcagatcatctgaggttgggagttcaagaccaatgtggccaacatggtgaaactcccctctctactaaaaatacagaaattagctgggtatagtggctcatgcctgtaatcccagccactcaggaggctggggcacaaaaattgcttgaacccaggaggcagaggttgcagtgagctgagatcatgccattgcactccagcctgggcaacagagtgagactctgtctccaaaaaaaaaaaaaaaatgaggttgttacctgattcagaagaataataccaaaataattcccaaatgaaagtatgacaaatttctagaaatactggtataattaactttatgcacagtatttaaagtcatttaatatattaccatttttttaatgctgaatgtattgattatatcttatacatctggacctgtgttttctataataataacagaaccgccagaaacttgccttgaatggacaaggtagggatgtggttaaaatgttaaaaattggactggcgtgttagttttctatttctgtcagagcaaattaccacaaacttagtgacttaaaacaacctaaatgtattatcttatagttctgtaggtcaaaagactggtatagtctcatcagactaaaatcaaggtgtcagcaggctgcattcctttctggagcctagaggaaaatattttttgctcatttgcgctattggtggaatgcagttccttgtggttgtgagcccgaggtctctgtcattctgctgactgtaagctgagggctgttccaagcttccagaggctgccgcactccttggctcttggcctcttcttccatcgtcaaaagcagcagcagcaggttgagttcttcttcacatcacatctctcaaaaccactctttttccaacatctttcacttttaaggaactccacagttagccaaagaaaagaaagaatctagcaagttagtctctagcctcctgctgctccactccacgcccccatataaccagaactgttctctgatctgttttatgtgtaagtgaataagtgttttatttgtttcaaacaaaagcttctgtggcaccaaaaaaaagtttgaataccacgaatactctaaatgcttactttgactttctgtggtgacaagtaagtgctgttaatgaggtagcattaattgatatataaccttcttaaatagacaaaattttcaaatactcagcaaccaaaagtccctagcaaaattcaaaggaatagaaattgcacagaccacagttttggaccgaaatacaataaaactaaactcatattaaaaatataaacaggccgggcgcggtggctcatgactataatcccagcactttgggaagccgaggcaggtggatcactcggggtcaggcattcaagactagcctggccaacatggtgaaaccccatctctactaaaatataaaaataagctgggcgttgtggcaggtgcctgtgatcccagctatttgggaggctgaggcatgagaatcacttgaacctgggaggcggaggttgcagtgagccgagatcgtgccactgcactccagcctgggtgacagagcaagactctgtctcaaaaaaaaaaaaaaaaaaaaaaaaactcataaaacaaaaaaccctactgcttagaaactaaaaaaaagtacacttctaactatttgatcaggaacacgtaaaaaatattgccagatacttagaaaataaagacgttgcaaatcaaaacttagagaatgtcagagaatgtggctaaaactggaagagttaaattcctttttttttgagtcagggtctcgctgtcacccaggttacagtgcaatggcatgctcacggttcactgtagcctcaacctcccaggctcaagcaatccacctgcctcatcctcctgagtaactgggactataggcacatgccaccacacccagctaagttttgtattttttgtagaaattgagtttcactatgttgcccagcctggtctcaaactcctgggctcaagcaatccacccattttagcttcccaaagtcctaggattacaggcatgagccacagcacccagcccataacgattttttagtgataaaaaatttaaagaatctttgggtttacttccagttttgtcacagtagctctcatcagactaaccctcctacaaataacaatgatcaactccggaaaaaaatataagaaacaactgcctgaacagtagagaaggaccacgagtgggcagacattggaggggagttgatacttggaagaatgaaatggcattggacaaattaccattttactcttacatgattttgctgaggacaagtccaagttggtatgggaagtaacgggactaacagttggatggaaaaccacaatccgactgggtgcattggctcatgcctgtaatcccagcactttgggaggccaaagcaggccgacatggtgaaaccccatctctactaaaaatataaaaattagccaggcatggtggcacatgcctgtaatcccagccacttgggaggctaatgggggagaatcacttgaacatgggaggcggaggttgcagtgagccaagatcacaccactgcactccagcctgggcaacagagtgagactctgtctcaaaaaaaaaagaaaaaaaaatcttagcttgaataacgagaagacacattttgggccttccacaaccactaggaaatgagggggaaagcctagaaagaagagaaacacagaggaggagcactaaatgctgttcatgaactctgcccacatcttgcgtgcagccatattaattgcctgtgtaaaattttaaaatccacacttttcagaaaaacataatgcaatccagattctctacagcatattaatttttcttttttttcttttttatttttttattttgagtctgagtttcactctgtcacctggactggagtacagtggtgcgatcttggctcactgcaacctccgcctcccgggttcaagcgattcccttgcctcagcctcctgagtagctgggactacaggcgcgcgtcacacaccgtctaatttttgtagtagagttggggtttcgccatgttggccaggctggtcttgatctcctggcctcaggtgatccacccacctcagcctcccaaagtgctgtgattacaggcatgagccaccgcgcccagtggaatttaaagaatttttaaatttcctcatagataaaggaaattatgctcataatgaaataggaaatttcagtggagaagtagaaactattgaaaagccaaatggaaaatctagtactgaaaaatataatatttgaaaaggaaaatttaccggatggccttaacagcagattggaaatggcaataagaagaatcagcaaacttaaaaatattaatagaaattatatagttttttgttgttgtttgtttgtttgtttcttgagacggagtcttgctctgtcatccaggctggagtgcagtggcgcaatcttggctcactgcaacctctgccttccaggctcaagcgattctcccacctcagcctcctgagtagctgggattacagacgtgcaccaccacgcccagctaatttgttgtatttttagtaaagacaaggtttcgccatgttggcaggctggtcttaaactcctgacctcaagtgattcacccgcctcggcctcccaaagtgctgggattccagacgtgagccaccatgcccggccgaaattatctgttcttaagaaaaagaaagatttttgaaaagggaaagcgctcctgtgatctatggaacagcatcaaaaggtctagggcaggcatggtggctcatgtctgtaatcccagcactttgggaagctgaggcaaaaggatcacttgaggccaagagtccaagaccagcttgggcaacctgtgagaccttgtctctactaaaaaaattttttctttgaaaaattagccaggcgtggtggcacatacctgtagtcctagctacttgggatgctgaagcaggaagacagcttgagcttaggaacttgaggctgctatgagctataattgtgccactgtactccaacctgggcagcagagtaagaccatgcatgggtgagtggatggatggatgtaacacacatgtaattggacttccagaaaaaatggagagaaagaaaaggcaaaataaatatctatttgaagaactcatggccaagaatttcctgagcccatgaaagacataattcacatatccaagaagcttagtgaaccccaactaggtaaataaaaataaaactatgccctgttccatgaagtcaagttgctgacgaccaaaaataggagaaaatcttgaaagcagctggagaaaaacaacatgttacatacaaggaaaccaggtgaaaaattgctgacttctcatcagaaactagaggccaagagacagtgaaataccatctttaaagtactaaaagaaaaattgtcagcctggaattccacgttcagaaaaaaagattcttcaagatgattatgaaataaaaacattttcaggtaaacagaaaagaaaagaattcatggccagaagaccagtactacatgaaatgctataggaagttagtcaggctgaggaaaaataataccaggtggaaacttggctcttagaaaaggaatgaagagcgctggacatagtagatataaaaggatttttcctcttaattttgttaaaattaatatgactgtttaaagcaaagttattatattatattctgtaatatataactcacatagatgtaaggcatatgataactatagcgtaggggctgggaacagcaggtaaatagacctataataatgtagcaggattcttgcattacataaagttgcacaatagtaactctaaacaggtataaagagttaaagatgtaaattatgtaaagtataattctagagtaactttttttcttcttctgagacagggcctcactctgtcatccaggctggaaggcagtagcacaatcatggctcactaaaccctcccaggctcaaccaagcaatcctccctccctgagacctcctaggctcaagcaatcctcccacctcagcctcccatgtccctgggactacaggcatgtaccactatgcctggccaattttttttttttttttttttttgtagagacagggtctcactatgttgcccacactggtctcctgggctcaagcagtcctcctgcatcagccttccaaagtgctaggattacaggtgtgagccaccatgcccagccaagagtaattatttttttaaatgcaaagagatatagctaaaaagccaatatataaattaaaattgatttctaaaaatatttacttagtctaaaaatattacttagaataagaaaagaagaagagaacagcagcaaaatgatggaacaaatagtaaaatgatagacctaaatccggccacgtcaataactgtattgaatgtaaaaactattaaatactcccagttaaaaagccaacagtgtcagaatagatttttttaaaaaaagcaaaacccaaccatatgctgttttaagtgcaagaaaaagcgcaagaaaaaataaagaaatacatttgaaaatcaatgtgattcaccatattaacagaataaagggggaaaacccatttgattgctttaatatatgcagaaaagcatttggcaagattcaacactcattcatgatttttaaaaatgataatgggttaaataattttcacagtgtgtatattttaacagaataaataaataaaactataaggaatttgaattaaaaggaatagtcctaattttacttaaataataactgctaataggaaaagaagggaacttcatcagccagatgaagactgtgaaaatcacagctaatagcatactttattgtgagatattgaacactttccccataagatcaggaataaggaaggttgtccactctgtatttgagttcaacattgtactgaaggttctagccagtccatgaaaggcaagtaaaagaagtagaaggcatatgtaagcttggaaaggaagaaattaaactaactgtagtcacaggtaacatgattgtttacatagaaaatttcagggagtctacaaaactaaaagaataagtaaatttagcaaggctgcaggatgtaaggtcaatatgcaaaatactatttgtgtgtgtgtgtatttcaatggctacagataattctatttatgctaacatcagccattcaaaattttactggaggcttagccagggaaattgggtgagaaaaagaaagaaaaggaaattggaaaagaagaagtaaaactgtctctcatagataacataatcttttacacaaaaccttgggcaggctcagtggcttgtgcttataatcccagcattttggaaggctgaagcaggagaattttttttttttgagacagagttttcgctcttgttgcccaggctggagtgcaatggcacaatcttggctcaccgcaacctccgcctcccggattcaagcaattctcctgtctcagcttcccaagtagctgggattacaggcgcctgccactacgcccagctaattcttttgtatttttggtggagatggggtttctgcgtgttggtcaggctggtctcgaactcctgacctcaggtgatctgcccacctcggcctcccaaagtgctgggattgcaggtgtgagccactgtgcctggcctgaagcaggagaattgcttgagcctgggagttggagaccagcctgggcaacaaaatgagacccccatctctacaaaaaagcaaacaaaaaattagccaggctgggtgcgatggctcacgcctgtaatcccaacattctgagaggccaaagcaggcagatgacttgagtccaggagttcaagaccaccctggacaacatggcaaaaccctgtctctactaaaaatacaaaaattagccaggcatggtagcacacacctgtaatcccagcttcttggaaggctaaggcacaagaattgcttgaacctaggtggcagaggttgcagtgagccaagatcacgccactgcactccagcctgggcaacagagcaagactgtgtctcaaaaaatttgccaggtgtggtggcacactcctgtagtccgagctacttgggagggtggggtgggaggatcacttgaacccaggaggtcgaggctgcagtgagccatgattccatgccctacactccagcctgggcaacagagggagacgctgtctcaaaaaaaaaaaagaaaagaaaatataagacattgccccctaggaactattagaactaatgaacaaattcagcaaggttggaggacacaaaactggtatacagaaatcaaatgtagtttagttttttattatgcataatttgtccatgtttatttcaacctatgtctgtcagtcttcattttatattgtaccatgttttaattatagttctatttccttctaatccgactctgaaaccctactttgtagctatgtatacacacacaaaaaatagctatattctttcattttcacaacagcataattctttttctgaaaatactggcgtgtagcagatattagcagataaatgtatttttctaggctaggcatggtggctcacacttgtaatactagcactttctttgtgaggccaaggcaggaggattgcttgaggccaggagttttgagaccagcctgggcaacaatagcaagacttagtctctacagaaaaaatgtgtgtgtgtgtgtgtatacatatatatttatatatgtatttatatttatatattcatatttatataaatatttatatttatatattcatatttatataaatatttatatttatatattcatatttatataaatatttatatttatatatgtaaaaccctgcttacctagaaaaaagcctgtaagtactgttaaaaaaacaaaaattggatttctatacactagcaatgaacaatcctaaaatgaaatttaaaaactattttccatataacagcatcaaaaaagaaattcttaggaacaaattatatgggcaataagacaaaaccccatctctacaaaaaaagttagctgggcttgatgaccttcctgtgcctatagtcccagctacttggaggctgaggtgggagaatcacttgagcctgggaggtcaaacctgcagtgagctgtgatcacaacactgcactccatccagcctgggcgacagagtgagatcctgtctcaaaaatcaaataagtaaaagacttatatgctgaaaaactgtaaaacattgttgaaagaaatttaagaagacataaataaatggaaagacatgccctgtttgtgggttggaagacttaatgttgttaaggaggcagtggtctccaaattgatttccagattcattgcaatccccatcaaaatcccacctgccttttctgcagaagttgacaagttgattctaaaaatcttatagaaatgcaagggacccagaatatcaaacaattttggtatctatgtaaaatctgagaaaatttatgttgtactctttaatgagccctacctattaggaaatttagcatgaaacagcttaaagagaggactttgactttttaatatttttctctgtcccagtatgatctgcaggattactttttacctttgatttgaatttatttatttatttatctatttatttatttatttttttgagacagtctcgctctgtctcccaggctggagtgcagtggtgcggtctcggctcactgcaacctccgcctctggggttcaagcaattttcctgcctcagcctcccaagtaattgggactacaggcacgtgcaaccacacccagctaattttttgtatttttagtagagacggtttcaccacgttagccaggatggtctcaatctcctgacctcatgatccacccgccaaggcctcccaaagtgcctcccaaagtgctgggattacaggcgtgagccacccacctggccaatttgaaatttttataggctgcaaatattagcctttgtaatgtaaaaaaaacaaagatgttgttgtcatttaaaatatgctaggacaagaacaggcagatcattagaataaaaatgtagcaacaaaacagactcaattttatctaagttcccagtattaaatatgggagaaaggtattacaaataagaagcaaaagaggatttagtcagtgatttgggacaactgatacagtttttgcagttttaggggagtaacttaaaattttttttaagtagaaaaaaatgtaaagtatttatcagacctcaggaagggcagtggtctgtttaggcttaaaagtgatagataatgttataaaagaaagaatagccacctttattaatgtaaacatttaactcatgtatgtttaaaattctgttaccaaaattagaagtcaaatagcacattactattggcagtgagggaggaagcagaaatggcaacagatataatatataagagcctcagatcatgaaaaagaatttccaagaccctggtaaacagaggcaaagaatgtggacagactgagtctctagaatgagtcctctggaacagagctttgtgcgggcaggtggtattcgtctcttttattctctgctacatccccagcatctagaacagaacctggcagagtaaatgttcaataaataattgggaaataaagaaaaattagtaaatttatgacaaacattcaacctatgtagtattcaaaagtctcgatttaaaacactgaaaacaataacacttctccagtatcagaatagcaaaggtttttaaagcttccaattcccagtgttagcagaggtccagcagaaaggacgtctacatagtgctgatacaaatacagataatgggccagacgcagtcgctcacacctgtaatcccagcatttgggaaggctgaggcaggtggatcacttgaggtcaggagtttgagaccagcctggccaacatgggaaaacctatctctactaaaaatacaaaaatttgccgggtgtggtggcatgcacctgtaatcccagctactcgggaggctgaggcaggagaatcgcttgaacccggaaggtagaggttgcagtgagccgagatcgcaccattgcctcacacccataatcccaacactttgagaatccaaggcaggaggatcacttgagtccaggagttagagaccagcctgggcaacatggcgaaatcccacctctacaaaaaaatacaaaaattaagctggatgtggtggcacatacctgtagtcccagctactggggggctgaggcaggaggatctcttgaggctgggatgcggaggttacagatctgagatcgtgccactgcactccagcctgggtaacagagcaagaccccgtctcaagaaaaaaaagaaaaaaaatgaaatacagatagtactaaaggaaatgacgtatttttaagtatatttttaatctcatgcatagaaaattagtgagtggaatgggggcagggtggcaaccagaaaatagatttgtggagcacttactgtatgccaggtactatgaaaaattacatatttttatgtaattttcacagtaaccctgtggtgtaaatattaactctacagataaactgaggttcagagagtaatttccgtagaatcacagtttctgcatgatgattattatagttaaactatgatttatatgtcagatgctgctgtaaagatctcgtgtgtattaactcacctccagcaatcctgtgggatgcaggtgctgctctctgcactcagtggattaaatgcctaggcagaaattaaatcatttgcctgcaagctggtaagtggctcagccatggtgcagaccagtctcttggctgccaggccggcactccaggtcccacgcccagggatgctccgcttagtaccatgtcactgcccttgtatgttctaggaggctcacagtgatttgactgggggactgtgagtgattgggtgtcttttattctctgtactatgtcttctcttatggttatgtattattaattactatttaaaactattgtctacatcctaaaaatcaaactaaaatttgaaataaattatttggaaaaactttgcagggagcttcagaagtaaaaaacaaaaactcggccactgtatggaagttgtgtcatacttgtctactactactttagctttccatttcctagaaatgtgtttgcactgtgatcatcaaaatagaactgtgcagtacttaaaatgtaagaatctgcaaaaacaaaactacagaacaaattccgaaggtgacctgagaagaccaaatggataagctaatacatccaggtgtctccgattatattatgataaagtgtagggaggttgaacgttacataaataccactggatatttttctttgttagatgtggccccatggtattggatgctttaatcaagattaagaatgaagttgactctactttgaccttccgaagatcatgcagagaaggtgagcatttcattcctgttgggctccagatacttgtggtcttccaaagaggcttgggctggccaaagctgatagagacatctggaaaacagctgcagctctctgctgggtgaacttgctgtgcaacctaattccttttcttgggtaaatgcatccaaaattctaaccatggtgcaagttctggtttctgagtttactttccttcaggagcattctatcctgtggttactgcatctggcggtccctgtgagctgctccacgcttcaaggcctagctaggacctgctggctggcaccttccatgctgctgagctcttttattaagggagcagtggagagtttctgtctggcacttatgcttgtccagcaggggagatgtgtgagtctccctcagctcccagcatgacatgtccttggtagctgtgttctggattggctggtacagtgtctccctcagcatgtggttacttgtgctgctggtgccacatgagcccatttgaggcagtgtgcagactaacattttctacatgaatagcaatgtattcattttctgtattagaaaaatataattactgccgggtgcggtggctcacacctgtaatcccagcactttgggaggccgaggcgggtggatcagctggcgtcaggagttcgagatcaacctggccaacatggtgaaaccttgtctctactaaaaatacaaaaattagccgggcgtgatagcggacgcctgtaatcctggctactcgggaggctgaggcaggaacccgggaggtggagtttgcagtgagccaagatcacgccactgcactccagcctgggcaatagagcgagacagtctcaaaaaaaaaaaaaagaaaaatataattactaatgatggtataatagggatataagtggttttttaatgtgaatttaagcaaaacaagttaaagaaaacccaagagatactttaaagaaagttgattcaggtggttctcaggtatagcaaaaattgcacagggtgcagtgaagaccgactggcctgatgtccgtggagccagactgtgtgcccggctctgttctgtgcactggacatgaggtagatgactgtgcttattatctaccttcaatttaaaggtgaggcccagagagggtaatggacttccacaaggacacatagagagtgacttgagagccgggagtcagccaaagctgtcagactccagactccagatctgctctctcaggcactgacttggcttggaacacctgggataaaacaaaagcagagagtagcttgattctgtgaggacactgagcttttttctaagaaaaccttaaaaaaaaaggaaaagccagtattgataccggcccatggctttttatctgttcagctgtacatttcaagcatttcaagtcttttaagacatctgttttgattcagctaatcttatttagcgttgcaaatgctgatggatattatgatagttcggctgagtcctgctgttcagggaacattctgcggcagttaaacagcagccttccccattaagtcctggcaacacaggaaaggtagatgcttttcagtaacctttccctgtaggactctttcagaaccaagaacataaggtgtgacccatctggactaaaaaaaataaagcagaattgtatcaattgctactcctttttattcccatcttgtttttcttattttttttttaattcccatcttgtaagagaattcccagggagcctttttgagagaaagttcattggatttatttttttaatttttatgccatttcttgtaaaagcaaactgctctagttggatgccaggtatacataaatgtattgataatatccagtctcttggggaactctaggagtatttgcttaagacacatctttgggttcccttacactctttctaagatttacaggagaaggagagtcttactgtcttttctagtcttatgaaagtgataaccgactgggcgcagtggctcacgcctgtgatcccagtactttgggaggtctaggtggtaggctagcttgaggctaggagtttaagaccagcctgggaaacatagactccctttccattaaaaaaaaaaaaaaaaaaggtgaggccaggcattcagaggccgaggcgggcagatcacaaggtcagagttcgagaccagcctgaccaacgtggtaaaaccccgtctctactaaaaatacaaaaattagccaggtgtggtggcgggcgtctataatcccagctactcaggaggctgaggcaggagaatcacttgaacccgggaggcagaggttgcagtaagccgagatcgtgccactgcactccagcctgggcgacagagcaagactccatctaaaaaaaaaaaaagatgataaccagtgcaactttctcaagcaatcaggtttctctgacctaatgatcttcaaaaaacagcttcagaggactggcactagaggtttagagtacataatcatttttaaattccaaaacacccaggaaatttccatatacaggaagtaggtccaggctaagaaaattctcatgtcggggtcctgggtcagcacgttttttgtttagtttgctttgctttgcctcagtttcatattagttcattcttctcctctttggaaagtccatgctgagtcagcttttgtggatttcatagccccagggtactatgctgcgtattttatgaagacaatagaagaagccttacctctgtcaagtgtagtggctcaggcctgtaatcccaacacagtgggaggcaaaggcagaaggattacttgaggccgtgagttagagaccagcctgggcaatatagtgagacacctgctctacaaaaaacaattatttttttcttttttttgagatggaatcttgctctgtcacccaggctggagtgcagtggcgcgatctctgctcactgcaaccttctcctcctcagttcaaatgattctcccgcctcaccctcctgagtagctgggattacaggcacccaccacgacttatatttttagtagagacagggggttaccatgttggccaaactggtctcgaactcctgacctcaagtgatctgcccacctcagcctcccaaagtgctgggattccaggtgtgagccacttcacccaacctacaaagaatttttttgaattcgccgcacatggcggcatgtgcctgtagtcccaactactcaggaggctgtggtgggaggatcgcttgagcccagaagtttgaggctaaagtgagctacagtgagctatgactccaccactgtacttcagcctgggtgacacagcaagactcagccaagaaaaaaaaagaagaagagctatctcttaataatctgtatccaggtcacttcaaccttaagatgaccaagacaatgttgatttactttacttttgggtattgtgtctgttagatttgtgttcaaataacagtggctttaaaaaatctaggtttccaggcgtgagccaccacacccacccctactcaggaggctgaggcaggagaatcacttgaactggggaggcggaggttgcagtgagccaagatcgcggcattgcactccagcctgggcaacaagagcaaaactccttctcaaagaaaaaaaaaaaaaataggcttgacgggtgtgtggtggcccagacctgtaatcccagtgcttcgggaggccaaggcaggcagattacttgagcccagcagttcaagcccagcctgggcaacataacaaaaccctgtctctgcaagtctcgtctctacaaaaaataccagaaaattagctgggtgtggtgggctacttctgtagtcccagctacttaggaggctgaggtgggaggatcacttgagctcaggcattgaggactgcagtgagctgtgattgcaccactgcactccagcctgggtgacagagtgagaccctttctttaaaaaaaaaaaaaaaaaaaaaaaaaaaaacaggctgatttttcttcaaaacacgtgacacatggagctagaactgctgtggaaactccatggtgccagcagcgcccaggcctctggcctcctccagtgccatacttggcatgtggcttctaacctcaaggttgccacatggtcatagagtagtttttggaactcaagccattagaaccacattcgaggcaggaagaaggaaggaagggagaaaagccaacaggcacctctgtcagaggaatgttgcatgtcagtgctgcccctgatggcacagcaaggaggatccagaagaaagtatttggggcaggactgattccggatatgggtgaggatgtgttaaatgtgtgtctctttcaggcatctgtggctcttgtgcaatgaacatcaatggaggcaacactctagcttgcacccgaaggattgacaccaacctcaataaggtctcaaaaatctaccctcttccacacatgtatgtgataaaggatcttgttcccgtgagtttctgcatctctctggttttgtttttatttgcatggggggcagtgctatgtgtgttacgctattagtttttcagggcaggatttgtttgagtatttaaggctcctcttctagtcagatagtaaatagatgggactgtttcctatattatggcaggaggaggaccacagtgtcactgagagattaggaaaatctccagatctgagacagtgtggccagagtttaattaaagaatttgaatggcagaagataaacgcctagaaaatcctccagcagctcatttggtgaggtttgtttgagaataatggggcacagaattttagaattggaacattcccagaaatgaataatttggccataactacaaagaaatcatgtggaaaatgccagttgggaaagcaacagctgtttatgagtcccactttaatttctacctccctatatttgaacacctttgctgacgtggtgttttcaagggcagaaaggactgtgggattggcaggtttcccaagtaggtgagggagaggtttcctaaccatgcttaacattgtgaccatttttccttttgtaatctttgcatatattcatgacaaaggaaaagagtctggcttctgcctggcatagagtggacgagtagtcagtgtccaagaaatggggtaaataaagctgaggtgatgatggaatctgatccttttcttcttcttcttcttcttcttcctcttaaccacaggatttgagcaacttctatgcacagtacaaatccattgagccttatttgaagaagaaggatgaatctcaggaaggcaagcagcagtatctgcagtccatagaagagcgtgagaaactggtcattagtccctatttattgtttcaatctgaagaatttattgcaaagatgattgccaggagtgtggcttggcagggaacataagctgatgcaagccatttagtgtattctggagaggaactggcacaagggtggggcactcatcctcttagggccgggtgagtagtgtgaacccgtgaatggcccagagtggaccaaggagctagagccctgtgccccgcctgcaggggcgggtggttgctgtgtggctactccatctttttcaaaagaaaccagtatgtaaattgcctgggctttaaaaagtgaccactaagtcagaactgttccctcactgggggcaaaatgaaacacatatgctggccagttgtaactaccaccgtcctgctttacaaatgggagtgaaatgttaatggcaaaacagagtcatcgatattctttcctgacaccatacttctggtgatctgtggggtgggattattcctggcctgctcactctctgggagttgccattcctgtgtacaagctgtaaaatcttaaagcggaggcatcattatcaagttttcagtctttcttcttctacactacttctactcctctgcgaagaagtcttctctgatttgcatactccctgcatacttgtggacgtgaggtaggaaggggaccaaatggagacagagccccacctgcaggtctgcacagggccaagggcaatggctgtgtcttcttcctttctggatccctaggccctggcgcatgttattttatccataaatattagttatgtaaatactgtaaaaatatatataaattttttaaaaggccagatgcagtggtgcattctgatagtcccagctactcaggaggctgaggtaggaggatcacctgagcccaggagtttgagagtctgagagtttgaggccagcccgggcaacatagcccaggttttgtctctaaaacatatacatatatgtgaatatatgaaaagtatcagttgtatgaatgaataaattaattctaccttttgagacttggtaaatatttagcatcctctcctgttgcccataaaacgttaagaaaggggagtccggccaggtgcagtggctcatctgtaatcccagcacttagggaggccgaggtgggcggatcacttgaggtcagttgttcgagaccagcctggccaacgtgataaaaccccatctttactgaaaatacaaaaattagctgagtgtggtggctcacacctataatcccagctactcaggaggccaaggcaggagaatctcttgaacccgggaggtggaggtttcagtgagccaaggttgtgccactgtacttcagcctgggcaacagagcaagactccgtctcaaagaaaaaaagaaaagagaaaaaggggagtcctagtaagtgtgcccagtctgtcaccatcaagatagtgagggtcagcacagtggcctgcaagtcagagtaagcctgggatgagacttcagagctgctcttctcagactgcagctctgctcctcagtttctacctcccagagtcttgtgcatcccagagtccaggctgaaccgggccctctggcccagcgagtcctttgcattcctaggcaaggctggtgcgtagctagtgaacatctccctgatgtggtattattagggattgaagagttcccctgagcatgtttggttttctagatacaagttgagtattccttatcctaaatgcttgggtttcagtgtttggggtttcatatgttttcagattttggaatatttgccttacacttactagttgagcaccccaaatccgaaatctgaaatccatgctccagtgaacatttcctttgagcagcatattggtgctcaaaaagtttcagattttggaacattttggatttcagattttcagatttgggatgcccaacctgtaatagaaatttactcatttactcatttacataccaaacatttaacattttttggcttccttaaattagtatgctgaacttaataaataattggaaaatgtggagaaatttatgtatgtatttatttttaattgggcagcccccaaaccaaaataggttcagagaggctccatcattttttaaataagctataattttcagcctggggaacatagggcgaccctgtctctacaaaaactttaaaacttagccaggcatggtggtatgcacctatagtcccagctactcaggaggctgagatgggaggattgcttgagcacaagagttccaggctgcagtgaactgtgattgtgccactgcactccagccaggggcacacagcaagaccctgtctcaaaaaaaaaaaaaaaaagaatttataattccaccaccaaaacataatctctgttaatatttatagtttcctttgttttttgtttattacattatatttttatgtagctgggatcaaaatgtaaatatgcttttatatcctgcttttttcacttatgttattgtgagcattttcttcatattcttaaaattgttcataagcattaacttacactttgctttctactgcttcagatgtatgcaccatgcgccataaaaccatttcactgttgctggacaatgaaattgtttccaattttttactgttagaaataaggctagatgaacatctttatccttcaagttctgcccaaaacattctaatttcttattacagatttttctaggagtgggttaaagaatatgactattcttaaggctcttaatcctgtgaccttatgccttctagaccagtggggccagttgacactcccaccagctgtctggacataacatagatttggttgaagactcatggttcaatcacaaccatcagttctgtctcatctgttctcaactgtcacttcaggtgtcagtgggcccctttcattttgctgtttttaatccatttctgttgtttccaaactcagaaagtccggtttgtgtttgggacttgttgggcagattgacccagtgtggcaggtgtgaaagtgcaggaagccagagccagctgccggggccacatcctggttctgctgcctatagtggcacgtccctgggcacatggcctaactcactctcctcgccttggttccttacctgtaagtggaacttgctggagtcacctcacaggattactgtgatgatcagttaaggaaagcgtgtaaggcgcagggcctccgtcaggattggcagtggcagtcactggggatgatgttgatgttcccagtgaaaacctgagggcccttctgctgagcccagggcagaagcagctacagactcttgctgcttcagcccctaggcttttgaatctctcccgtcttgacctcattccaggaagctggaatttatgggagttgtttttgtgttcttgttttctatttcttttttagacaagtgagaggttcttgtttattaaagggaaagtgcactatacgtggatttaagaaccctgggcagatgtttacatttcacttgcaagatctttattaatctgctaaatatctgcaaatcaccccttggattttgctaagaaaattcacatgcaagtaggcactttgttcatgcactgaccccaaaggtaacatttaatcagctgaagacatagcagagtctctcccgtcacaagctcctgcctctcttttctccccatacaggacgggctctacgagtgcattctctgtgcctgctgtagcaccagctgccccagctactggtggaacggagacaaatatctggggcctgcagttcttatgcaggtgaggtgctccttaattgctttaagagaaattgaaactcaagcatccagaagtccaagaggacaatagattgctgtaagccagccattctgaggggcctggtttccttcattgccatccagtccaaacagggtaattggttgcattgtattcacttgctttcggtaaatctggggccttgtctgcaaattgcctttgtttcagtgcagtgagggtcaccccaaaggggtgcaaaccatgccttgcagatgtttaaaatgtatttccgtttgcctggtggtcagaggctccccctctccctctcataggatttgtaacataagacttgtagcgagcaagcaggggagaaagcagtgtctttgaagggcagctgcccagctatgagattggaagctgtttcccagctaatgaaagcctggatttaggggttgcttagaaagaaaatagtattgatgttcactgcaaagaaagtcactgtctttgttcccagaaagcttgtgcttttttagatacgtgcttttcacagactctaggcaactcaaaaaccaacttctctttctcattttcccacaaaaagagaagttacaggtttgtgtgaccacatgagcaatattgattcccagccatgtgaagattggataatgaagtacactcatacttgtcacttttgccagctgctccgagttggggatgtagaggtcctctaagtaacactgctagagcaggcctatggtcatgtgattaactcgtttcagcctgctgatctcaggctgctgagagcgctgtgtaagttcaaagaatcattaagtgggacaaatactatctgtagacaggtctgttaaatcattcctttactcagagacagcaagtccagcatgggtaggtgccatgaagacagataagagttatatgatacagtccctgccttcaccaaattataagctgggtaggaagctattgagcaatgtgaaataattaggagatgatacccagtgtgtataattaagcacccgggtaccaggtgcagtatggatcaaaggtttgcagggaccattaatcaagtgaagctacaagtgttgggaacctttccttgaaagatggacaagaattaaagagtatggagatgaggcatctaagctgagtgaattccctttcctctgcactcccagagctttgagttgagccagggtgccgctctggcctgttgattggcagctcagctaatcatccctggttttccaggcctatcgctggatgattgactccagagatgacttcacagaggagcgcctggccaagctgcaggacccattctctctataccgctgccacaccatcatgaactgcacaaggacctgtcctaaggtacgtggggctggtgaccctcagctctgcctcagagctgacacgccagaagtagcatgtgctcacaaagaggtgattggcagagagcaaccctagtcatttgagaaggaaagggaccagcatatgcctgtcctttcagtgtgagcctaggggctagtttggctcttagttgcaaggagtagactgactcgggccacctcaggagcaggctttatttgtaggctacacagggacattgtgggagttaaggatgcacaggaacccatgagcaggtacctgcgttcaaccttcccaggaaacagaaagcgaaagccgttggaacgtgggcagctgtgaggacttcatttcttctccatctttctcgcgatgtcagctgctaatctgctctgctctctagcagcctgttctttccttcggctctgtggaggttttctctgactcaaagctctggctttcgttcctcttcctgctcgcatttgctgctgcttttggctcactctggcctggattttgcctcccagcacacttccagcttcagccacccgcctgcctcccagcacttctcagcacagtttcctgagagggtgtcgcattggcccagctcaccttctcatgcctgcacatcagaggccacagctggctacagaccggctgccctttggccaggttctgtctcagtctgttttgtggtactatcacagaatttcagactgggtaattttataaagaagtttatttgacgcacagctctagaggctggcgccagcatctaacaagaaccttcgtgctgtattaccccatggcaaaaggcagaagggcaagagaaagggagcccaagctcagccttttttttttttggagacagagtttcgctcttgttgcccaggctggagtgcaatggcacgatcgatctcagctcaccacaacctccgcctcccaggttcaagtgattctcctgcattcgcctcccgagtagctgggattacaggcaggcaccactcatgcctggctaattttgtatttttagtagagatagggtttctctatgttggtcaggctggtctcgaactcccgacctcaggtgatccacccaccttggcctcccaaagtgctgggattacaggcgtgagccaccgcgaccggcccctctcatctgttttttttaaaagacagggtctcactgtgttgcccaggctggggtgcagtggcgcaatcatagctcactgcagcctggaactgctggccttaagtgatcctcctacctcctgagtagctgggactacaggcacacaccaccacacctgactaatccaaactcatccttttatcaggaacttactcctatgataatggcaatccatttgtgagggcagagccttcataatctaatcacttcttaaaggtcccacctctcaatactgttgcattggggattaggttttcaacacatgagcttttggggacacattcaaaccatagcaggtgtcagccctggtccagtcagccttgcccagtgggcagggaagggctagggctgtgtggttcagaacacggctgccctccgagcaaagactgtgggtgatttcactcaaaagttgcagtgagtcagtgggcggcaaggtggaaaactgtagggtggccagttagccgtaaaaaaagatcacactgtgtgtttgaaaacatgaaatccaagctgtagaattcacttattttttgcctggaaaccctctgtgtttccagtggcctcgctgggggagcccacaggcttcagctccctattgcctgggcttccatctgggtcctgtccccaggactgtggtttaccatgattgtgcctgtgaatagctactgacctctgaggcaagttatgctataaaagtgcttggaacagtgcctggcacatagtaagcacccaataaatgtcaccttatgttattttttaaaaaaacatgagtactgggcttgtttgagacagagatagcatcttcagtggtggggcctggctgtgtgtttcttcagaagctctgcgagtgactctaaggtgcattcctggtcacaaacctgtgcatggaggggatgggtgcagcagacaactgagacagccaagaacaggttctctgtgccttgccctcccttctgtaaaacagggctggaagttgggactgagacatagacataggccgatcatgaaactggaagggacttgaaaaccatcaagtttaatccccttatacagatggggaaattgagccccaggtggggaggggagtgactcgccccagatcactgtcaggtcagtgggaaggtaggactagagttaggccgtctgcctccccatccagtgctctttcttcctgcatggattgggtatgtaccaaccttctaagtctaaacacccttactgaccctgtggggaccggaaatacacaggtagatccagattcagaaggatatacagtgaaaattctccctcccactccacccagccacctccctagaagtcagattcttgtgtgaacttcagaggtgttttatgctgcacacaaatgcatatgtgtcctcttctgtctttcttatatcacatttatctgtattttttcacccactatattttggagattatcccatgttggtatatgaagagtgtctttttgaccagcctggacaacatagtgagatcccatctctacaaacaaaattttttttaattagccaggtgtggtggcacgcacctgtagtttcagttacttgagaggctgaggccggaggatcacttgagccaggtgttccaggccacagtgaactatgatcacacttcagcctggatgacagagcaagaccctgtcaaaaaaatatatattttttctttctcttcttctctcaagatctcttttctttctttccttttcttctttctttccacaacacttttttaggggggtagacttatccttctaaaatgaggggaaccttcactaacgtcagatgagtacttgtctcattttaccaagtacttgcttggtaaaagcaagtacttggtaaagtacttcctactttctacttcaatgaagctggcattcagtgggtttaattattgtgcctcctgcaaagcagatgttaacagctgtaggggcaaactgcagctaataccaatggtattggccagttgaaatcatcatggttttacaaagggttaatagagagggtagtttcttccacatacttttgagagctggtatatgctgatttctgctgctgcctatttaataatgatgatgtaaaagatttagagatgtctggctgattttgacattggcctgtagtcctagaagagacactaccctgagtgtctttgagcagtcagagagtgcacctctgccctgggcctgtttacctgttagagtgagccacacaagaaggaattcaacgtggcagagctcttgccagagggagctgaccatcttcaaatgttaaaaaaggtagacagaagagagcccttagcccaacccctatggttttgagggacttgatttgcattcaccttgcttggacactgaaccagctgaggaaggagtttcacccaagattgtgggttttccctttcagtttcagttatcatttgttattgattcttttctcttttttcaagggtctgaatccagggaaagctattgcagagatcaagaaaatgatggcaacctataaggagaagaaagcttcagtttaactgtttccatgctaaacatgatttataaccagctcagagctgaacataatttatatctaatttgagttcctttaaagatcttggttttccatgaatacagcatgtataataaaaattttaagaaataaatgttattctactttattaacaaaaaaaaaagaacctgttcctttacttgccgcaggggaatgtgaaggtgccaggagtccttgtccttggagagatggacagggcttcagagctgagcgggggtgggggtaccctagctggaaggaggtgatgagccgtggaactgacatcagcagggcctgcagcttgttcccagctttgccactcaccagctagacaaccttggacaagttccttcacctctttgctgctccattcgcccatctgtaagatgggatccataattgtgcctacttcattcatctggtatgagaatgcctggcacttattctgaacactcagttagtgttagtgttctgtatcttcccagtttctatagttttcagtaccagaattactgaaaaccaaatcttggtaagtctttggatacgtcggtgaggccaggtttgagattcctccagcacagagcaatgaccctggtcagttgtgaatccagttagttccacaaatgacctcgtggggcctctcactgcaaacatcaactccacagcactgctgccttggctggcatgctcactgcacagccgggcgtggtggctcacgcctgtaatcccagcactttgggaggctgaggcgggaggatcatttgaggtgaggagttcaagaccagcctggccaacgtggtgaaaccccgtctctactaaaaatacaaaaattagctgggcagtgggtgtgcgtgcctgtaatcccagctacttgggaggctgaggcaggagaatcacttgagcctgggaggtggaggttgcggtgaccgagatcacaccgctgcactccagtgtgagcaacagagtgagaccctgtctccacaaaacaaaaaagcaatgcaaaaaaggagaaagggggaaagtaaaagtggaagctcctccaaactcatcccgttgatagcttagacatttccttccacactctacgttattacagttatgcagcatatataaaactttctcccttcaaaagtaaggtaccatagagccaggagctgtggcgtgtgcccctaatccagctactcaggaggctggggtgggagcatcacgtgagcccaagaggtcggggctatggtttgccatgattgcgcctgtgaatagttactgcgctccagcctgggcaacatagtgagaccccattcctttaaaaaaaaaaaaaaaaaaagcctggaacagtggcttctagcacttttgggaagccaaggtgggaggattgcttgaggccaggacttcaagatcaacctggccaacatagtgagaccctgtctcttttttttcttaacataccaaaaaagattttaaaaataaaggggtatcctatagtctgccagcagctattttttttttttttttgagacggagtcccaaaaaaaaaactgcactccgcctcccgggttcacgccattctcctgcctcagcctcccaagtagctgggcctacaggcgcccgccactatgcctggctaatttttttgtatttttagtagagacggggtttcaccgtgttagccaggatggtcttgatctcctgaactcgtcatccgcccgtctcagcctcccaaagtgctgggattacaggtgtgagccactgcgcccggcctctatttttacctcacaatgtagaagggatttcagtgctaataaagacctacctttttgttgttgttgttttgttgtgtgttttttttttttttttttttttgagacagagtctcgctctgtcgtccaggctggagtgtggtggcgcgatctcggctcactgcaggctccgcctcctgggttcacgtcattctcctgcctcagcctccagagcagctgggactacaggggcccgccaccacgcccggctaattttttgtatttttagtagagatagggtttcaccgtgttagccaggatggtctcgatctcctgacctcgtgatccgcccgcctcggcctcccaaagtgctgggattacaggcatgagccaccgtgcccagccaagacctcccttatctgtgtgtgtgtgtatgtaaaaatttttggaactcctgcttaagagcactgtggcatgggtgtacccttatttaaccattcccctactaaggcacattcgggtggtccctattcaccttttcatccaaggctgcttttttaagtcgtagctggaaacctctggatcatccggaaaacaaaggtttcatgcatcctgaggcaagcagctgagaaaacgtgtgactcaccgagaatgagccttaatgagcattttctggcttaaagggctgattcaacaagcatctgtctcaggcattatggaaggtgaggtgctggggacaaggatgaacaagatttgttgcctgcctgccacctaggagccaaggtcacaaaggaaaaaggaacaaacatcagaaatttcaagaacagggccgtgtgcccctccctacagcatcttggaattcttgactatctcagtgagacacacagtacatggccctgcggcgctgaagcctaagattgtggagtgcactggcttcttgaaagacagtggaacttgaactgcgggccatgtctgtggatagcttctgttccccagctcagacctaatggctttctatcagcctggggaaaggtcacattccttggattcatggataatttgacttggcttctaatctccagatctgtagggaaagatgggtttttctcatgaatgactttttttttttttttttttttttggagtctcgctctgtcaccaggctggagtgcagtggtgcaatcttggctcactgcaacttccgcctcccaagttcaagcgattctcctgcctcagcctcccaactagctggggttacaggcgttacgcagctaatttttgtatttttagtagagacagggtttcaccatgtttgttgagcatactgatctctaactcaagcgatccacctgcctcgacctcccaaagtgctgggattacaggtgtgggcaagcacaccctgcttctcatgaacaacttaatgctttgtaaagatgggtccgcaacaactgataagaggcagggtgtagcttaggagtcgccacttcagatcagcgtcatcagaggctgggttgactctgatggtcactctccgcagttgaactccaagttaaattggtatatgttatcaactgatagtttaatttactgcttaatctttcattgaattggagacaaatgttctattgcaacagtcacaaaggcttttccagtaaaactgcagacctgtgtggggaacagtattttgtcctgtatgctacttctgtgcccagtgtgccttcatttacaagataatacttccagcctggccctgtggctcacgcctataatcctagcgctttgggaggtgggaggattgcttgagcccaggagttagaggctgccgtgaactaggatcgtgcctctgcactccagcctggatcacagagccagaacctgtctctaaagaaattaaaaataaaaatagaatttcgtaggactgaagccagccatcccttcttacctagctctggacatgttgaacatctgtgactctattttcctatctgtaaaatgggaattaacagcattcccctctcagaattatggttgaagtctaaaagtaaatgtgaaagcatcttgcctgcagtagagtaaatgctccataaactcaagtgaacggatttgtcttgagtacctactatgtgaaaggccctcgagtgaatgctgggaggctgcaagagtaattccttcccaaccctgagttgacagctggcatgtttctgacatgactggccagagctagaggcctccctgttgggaggatggtttttccgtgcaaggctaatattgcttatttctcatctctcccgtcacactgctcaggtcagggagggactcccattggtcaaattctcttcaggccccttcccttcctggcaccaggataactaccatacaaagtgctgaaactcggccaggcacagtggctcactcctgtaatcccactttgggagaccaaggtggatctctgaagcacaggagttcgagaccagcctgggtaacatggcaaaccccatctctacaaaaaaaaaaaacagaaaaattagctgggtgtggtagtgctcacctgtagtcccaggtacacagaaggctgaggtgggaggatcacttgagccgaggtgggaggatcacttgagcccaggaggtcgaggctgcagtgagctgagatcatgccactgtgctccaacctgggcagcagagagagaccctgtctcaaaacaaacaaacaaaaaaaacaaaaacaaaaactgaaaccccactttactgtgtgtctagacagccataatcctaccaacagggtttgttactaggtgaaaaaaatcctcttttgttgcaaaaatctagtgaaactagagaagtcgaaaagtaaagcaatgctctggaataaactcgcccaaattagtgatttctcaagctttttgccactgggaccaggcctattacgccctctccgtgggttcccaagagagccacagcctagaagggaagctgttcagtcggttctcacccacgtgggactggaaatttcagacacggttatccgggaagacagcctgggccacagacctcctcgatgaccacacaccgagagccacttccccaaaggtaaccccaagcagatggcaaggcctcccacatgctctgtggtttggaaggaagcttcctctggcctcctccctcattaaggagaagggacgagctgcaggtgcggctccttcccagctggctcagggaatagagcccctttaaggccaggcagccttagcaataaaaagaatgaagggggcacccttgcaaggcagtcccccatgcagtccccaagccctctgcttttatttatttatttatttatttatttatttatttatttattttagagggagtctcagtctttcacccagactggagtacctctgcttttatgaagccgctaatccagtgccaggatctaaagcaagcagctggcttctaccaagttcctgccatctcatttcatcctctccatgccttccattttgtaggtgaggggaaggagagccttagagaaggaaagtgacattttaaagctcacacagctagaaagcaactcatgcatccatgtctttctgatgccagaacccagccccttgccactgtaccatactgcctcttgccaaggccacctgggctagccatttccaaacccagccttcctgctgccctggaggctgggttcctgccagaaattgagctaagccctgggggaggacatgggagttctgaaaagttaagcagcctgcctcccctggaagtgtcaccggaagatgaaagaactcttgtcacctgacccaaggaagccagtcccatggcccaggtggtcaacaggaatgacccgcaactggttggctcgggcagcctgccccagctgagtaaatggctccactggcacccagctgctcaggccaaaaccctggggagcatcttgaattccacacattcctgcacccccacatcctatccaccagcaagtcctgccaacgtgtgttcctgtaccaaatgttcactgggatcttgctatgaatcaggtgctgctttccctcctggggtctatcccctacccacaccctcaccaccatcacagctgtgtctccttccagccccttccacaatagggatcgttggagttttcctttccttgactagggctacttcccagtagacagcagtctccgcagggacaggggcatctctgttttgttcactctcacgttcctggctcccacagtggtgctggcactccataaattcatactggacaaatgaccagtgatcctgcccacgtctatccttggccctaacgtgaaccttcccttgtttgccctaggatctcacagatccactctcccctttggagctcctctgtccagaggtcctggagacagggaacactatgcctgtgccggtcactatggggtagcaggataaatgctgcacgcaggtaagacatctctggtgcctttcaggggtcttcatgaatccccccagtgcaggtgtgtctgcaggtcacgctgtgaggcttctctttctctggcatttcaaggcctccagtgcatcatggcagactctccctgggtctctgtgggcccacatctgaccctgtgaatctctgggcaggtgtgtcttccttctttgcattcatcaagcagcgccaggcactgtctcaagtgcttgatacgcattttcttttttttttttttttgagacagagtttcgctctttttgcccatgctggagtgcaatggcatgatcccggctcacagcaacctccgcctcctgggttcaagcgattctcctggcttagtctccgagtagctgggattacaggcatgcgccaccacgcccagttgacaagcattttcttgtgtgatcctcgcagcagttctctgtgaagcaggcattgctatcctacaggttgggaaaagagggccagagaggatcagtgacttgctcacggtcgcgcggcctggaagacatggagagctggaccagcacgcacagtccctaaccactgggacgtgctggcgggggctacctccgtgaggtgtgtgtctccggtcgccccgcccccggtgtgtgcggaggagcaggcggggactacaagtcccggcagccccggcgcgggcgctgcgagggccgcagagggccgggcggggcttgcggcgcgcacggagggactgcggcagtgtcggagccgcgccgagcctggtggcccaggtgccccgcccgcgtcagccctgctccagccccgcgctagcccagcgcccctcgccccgggccgtccggaccgcgcccccgcccagggccttgcgcacgccggggcccaggccgagggccgcagcgccggggccggcgatgagcgcgaggagccggcatgagcgcaggtgagtgcggagtccgggtcggccccgagcccggcgcggtccccggcccgccagttgtcgtcaccccttggagggagaggggaggcgacgccccccaccgcggggtcgcgagcccaggaagcgggacctggttggggatcctggcccgtcccctcccttttgacggggactcggccccggtttcttcccagagacgccggggctggggatggcgccgccgctcgcagccggtccctcccctcccctgcacccctcagccgcgggattggaagccgggcgcttgtgcaagagggtcctggggccgtgcggggacggggaggccaccccacgcccacttaatcggatcccaccccgagtgacggatgtccaggtgggggagacggctgcatcctcgggcctctgggcaacccctctgggctgaatgaatgaatgaatggcgttgggggagtcgggactccatttcctgggtagatgtcctgggccacagcgccactcctgacctcctgcctcagaccccagagaaaacccgtcacacccagggccaagggccacaccctccatgcaacccatccctggccagatgtcctacgcccactcctccagggtctaatttaaatcccacctgccgggaatggggccagtcctcctcccctatccagaaaggtctcatctcagtgtctgtcactcagcccccagccccacagcctagagtgcaccccccggcgagggaggggaaggaatgaggaaagacagcccctagaatccagatccaaagatgggaagatggttcacacacactcccgcctcagcctggcagaagacaggagctccccgccgccgggaaccacagccagggaggaggcagccgccctgggccgctgccaggtcaccagcaggaagccaaggcttccgcaggaaataagaggtcccaaatggctctagcccctctgatccacagtgctggtgacactgccccgagctgtgacctcagacgaggttcaagtccagtcttggcccctcatagctgtgtgactttgtgcttgtcaatctactcctctgggcctcgttttaaatgggaatcctaatctgtacttttcatggaatggctgtgggaaagaatgtgcccattcagacacactcatttccagcttctcccctttcaagctctatgaccctggacaagggattcacatgctgttcctcagtttccccaggtgtacaatggggataataatagtcactaccccagagggttgtgtgtgaagcttcattgagttagcacactgaagggcttccgcagggcatggtgagcactccatgggagctgctgttcatcagaagagcaatgacaggccaggcgtggtggctcacgcctgtaatcccagcactttgggagcctgaggcaggcggattacttgaggtcaggagttcaagaccagtctggccaacatggggaaaccccgtctctactaaaaatacaaaaattagctgagtgtggtggcatgtgcctgtagtctcagctacttcaggaactgaggcaggagaattgcttgaacctgggaggtggagggtgcagtgagctgagatctctccactgcactccagcctgggagacgggcaggggggaaggggggaacggggggggaagactccatctcaaaaaaaagagcaatgccatcatgaaggtgctctcgcccccccacacagcctgtgggtgcctgttctgggctggtctgagcccacagaagccctggggagactgggctgtggctggggataaacagatgtactgcaggagagagtgccctgggcttgatccctgcagggaggggctctggaggtttccacagctgtgacttcctccctcaagttccactccccttttcctctttgccaaggttgactgagagagtgtcattgtgaagtgacagtcatacgattgccatgaggaagaacttcccagggggaccgctgtttacatactggggactctgccctctttttgaagaaccttttcttcataaagagtcttgaggccgggtgtggtggctcacacctgtaatcccagcactttgggaggctgaggtaggaggatcagcatgaggccgggagttcaagatcagcctgggcaacaaaatgagaccctgtccctactaaaaaaaaattagcctggtgcagtggcacctgcctgtagtgccagctacttgggaggcagaggcaagagtacctcctttagcctaggaggtcaaggctccagtgagctaggatcatgccactgtgctccagcctgggtgacagagtgagaccctgtctcttttaaaaaaaaaaaaaaaaaaaaaaaggaagaggctcaagcccctccccccaactcccagcacctttgccttcaagctctgttgtgtccaagagacagacattcattcattcagtcagtcggtcaatcagtgtttcctgacccctgagcacatggcaggtactgtgagcagtaagggcagtgacacccatctgagcctgatgctgaggggaatgtcaggagtagatgtgctgggcagagaggacctgggagtaaggccagccctgttccagctttgagacaagtctgagggcaactgccccagaggctcagtgctctcgtttgtcaaactgggtaagagagcccaccttgtgggttggtgcgggaggaaatcaaatcagcaccgcagggatggctcctttcccatcatccctgagcccgctgggctgttggcctgagggtttttttttttttttttgagtcttgctctgtcaccctggctggagtgcagtggcgtgatctcagctcactgcaagctccaccttctgggttcacaccattctcccgcctcagcctcccaagtagctgggactacaggcgcctgccaccacgcccggctaatttggtttttatatttttagtagagacagggtttcaccgtgttagccaggatggtctcagctagtctccacctcctgacctcgtgatccgccccccttgggctcccaaagggctgggattacaggcgtgagccactgcgcacggccggcctgagggttttaaggtacaaggagcaactgttgaatgggcctagggagccgtgggacagccagggcttcagacagggtgatgtgaaaggagaagagagcctgggaaatggataagcagaagccacgcccccctgacctgggagccgggtcctgcccacctgtccacgcaacccccccaggaacttcaaatgcttctacctccctgtgtgctggatgcttcgggactatcatcctagagatgagaaatggaagcccagagaggcaaaggcacttgctgtatgaaacacagcatcaaaaaagaaattcttaggaacaaatgatgggcaaaaagacaaaaccctgtctctacaaaaaaaattagctgggcatggtggcctgtgcctgtagtcccagctatttggaggctgaggtgggagaattgcttgagcctgggaggtcaaggctgcagtgagctatgatcgcaacactgcactccagcctgggtgacagagagagactgtctcaaaaaaagacttatacacgaaaactgtaagctgggcatggtggctcacgcctgtaatcccagcactttgggaagccgaggctacaagagtgataagtaaataaatgaatgaatgaatgaatgaaaggacatcacaaccgaggttacctggcagggttgatacgttagccatgtaccctgtgcacagtgagccctctaggagtgttgaagccagagtgcttggggatggggctgctcagaggctgggggtgctgtgcccacagcagctgcctggggcactctggactctttgggtagaaattttagaagggctcgccgggcgctgtggctcacgcctgtaatcccagcactttgggaggccgaggcgggcggatcacgaggtcgggagatcgagaccatcctggctaacacggtgaaaccccatctctactaaaaatacaaaaaattagccgggcgtggtggcgggcgcctgtagtcccagctacttgggaggctgaggcaggagaatggtgtgaacccggaaggcagagcttgcagtgagccgagatcgcgccactgcactccagcctgggtgacagagcgagactcgctctcaaaaaaaaaaaaaaaaaaaggaaaaattttagaagggctcagattgggggatgaaggagggagcccagaaaatcagcagcctaccccgcacccgcccagcttttccagcttagtgagctttttcagaggctcttgtgaaaccacagatgcctagcaccatccctaccccggcctgaggagttgatccagccagtctggggagggccctggcatctgcatatgtaaaaggtgctccaggtggtctgggaccgtagatgaaccctgacagaggctgtccaagggtggggctggtgagctctacccgctctggagccccagaacatccactggctgcctgccctgctaaggccacagctctacagcacaggaggaaggagtgaaaagaatgtctgtggccgggcgcagtggctcagcctgtcagcccagcactcagggaggcaaggcgggtggatcacctgaggtcggcagtttgagaccaccctgaccagcatggtgaaaccccgtctctactgaaaatacaaaacttagctgggcgcctgtaatcccagctactcgggaggctgaggcaggataatcgcttgaacctgggaggcagaggttgtagtgagccgagatcatgccattgtattccagactgggcgacagagcaagacttcatctcaaaaaaaaaagaatatctgcaatagaaccacctgataccattccccaagtctcagtttacccatctgtaaagataggcctgcagggctgaccgtttattagtccagacttgactttgcatctcctcactgccagacctgggctgggcacgggcatggaatgaagataagcatccctgacccctgccctcagggtggggactggatgaggatagaaaagtgagacccagagctccaaggaagctaatggctggatgcacgagcaccatgggggcttggggcactgtccaggccccattctccaattctgggccatacccagcagaaagaccgacacacgcaaggaaacaagacactactggccaagcacggtggctcatgcctgtaatcccagcactttgggaggccaaagtgggcagatcacttgaggtcaggagttcgagaccagcctggccaacatggtgaaaccccatctctactaaaaatacaaaaattagctgggcatggtggtgcatgcctataatcccagctactcgggaggctgaggcaggagaatcgcttgaacctgggaggcaaaggttgcagtgagctgagatcaagtgactgcactccagcctgggtgacagagtgacactccgtctcaaaaaaaaaaaaaagatacggtaagtaagaaccgacggaaagaagagccagataaaggacacaggaagacatgagctttgggctctgtcagaccaggtgcttactgttttgtgttttgttttgtttagttttttgagatggagtctcactctgttgctcaggcaggggtgcagtggtgtgatcttgcctcactgcaacctctacctcccaggttcaagtgattcccctgcctcagcctcctgagtagctgagattacaggcacgcgctgccacgcccggctaattttttttatttttagtagagatgggtttcaccatgttagccaggttgatctcgaacttctaacctcaggtgatccacccgcctcggcctcccaaagtgctgggattacaggcgtgagccaccgcgcccaggctgatgtttattgtttttaaggaagcaagaggagaaggtgcctccccaaatgacctttctcttttctgtccacagacagcagccctctcgtgggcagcacgcccaccggttatgggaccctgacgatagggacatcaatagatcccctcagctcctcagtttcatccgtggtaagtgggcagagtggggtggggaaaagctgcagggggtgaatgcccaggcccacccagacaccccaacttcctactccagccccgttcccaccccgacctgggccctctctcgctgcgttcgcagaggctcagcggctactgtggcagtccatggagggtcatcggctatcacgtcgtggtctggatgatggctgggatccctttgctgctcttccgttggaagcccctgtggggggtgcggctgcggctccggccctgcaacctggcccacgccgaaacactcgttatcgaaataagagacaaagaggtgagagtcaggctgagcctggggctagagaagcgcagtgagggtcagggtcgggggtggaggatgcttgggtgccaacccggccactgactttccatgggacattaggcaggtcccgctcttctctggacctcagctttcccatctgagcattgggcagaagggacgggtcgggtggtttctggagggctctccatagccttgatttctgccttctccagcaggggccgcctggctgtaggacagggcctgggaggggaggggactcttctgagactgagtccatacctctgtgttccaggatagttcctggcagctcttcactgtccaggtgcagactgaggccatcggcgagggcaggtgaggcagccccattgccccttcccagaagcccctgctaccctggcctccccaacttccccaaccctcggcccccccataaaggctgactctggcgcctcccatcctagggagggaagatggctctgtgagcacagggaggtgccagggcagctcccagagctcgagagtaaccctcacctgcttccccagcctggagccgtccccacagtcccaggcagaggatggccggagccaggcggcagttggggcggtaccagagggtgcctggaaggatacggcccagctccacaagagcgaggaggcggtgagtgtcggacaggtgggttctgaaaaagtccttgcccctctctcggcctcggtttcatgatctgtgcaatgggagagtcagacttcatgttctcccaccaccttttagttctgttgtcccaaacatccaggatgctgtctgagcacgtttacactttcaggcctctccccacctctctgtctggtgacaccagtccctgccccctacccccatccctcggctcccagcataagcacactgcttctggggccggggccagcttccaacccatcctctcctctctcccacccagaagcgggtgctgcggtattacctcttccagggccagcgctatatctggatcgagacccagcaagccttctaccaggtcaggtaggagtcagggcctgtgtggctcatgtcacctcccagagtggcactggtttgggcacagacggtggcatggcatggcctgggctcccctctcagctctgatgcttttgctgtctgaaaccttgggcaggttactgagcccctccaggcctgggatctctgtctataaatagggcatgaagataacttctgcctcctaggattgttttgatggtgaaatagataataatttatgtagagcttggcaccgaatgtgatctgaggttgtgacaccactgtgaatcagactatcagctctgtactcagactgtctgcttggggtttagtcactgctctgccacctacaaaaggcttaagaaacatgagctcaggctgggtgcggtggctcacccctgtaatcccagcactttgggaagccaagacaggtggatcacgaggtcaggagttcaagatcagcctggccaagatgctgaaaccccatctctactaaaaacacaaaaattagctgggcgtgatggcatgtgcctgtaatcccagctacttgggaggctgaggcaggaaaatcgcttgaacctgggcggcagaggttgcagtgagccaacatcgcgccactgcactctagcctggatgacagagcatgactccatctcaaaaaaaaaaaaaaagaaaaagaaacacaagctcaccacacaccttagtttgtgtgtatgtgtgtgtgtgtgtgtgtgtgtgtgtgtgtgtgtgtggtttttttggtttgtttgtttgttttttaagatggagtttcactcttgttgcccgggctggagtgcaatgccgcattctcggctcactgcacctccgcctcctgggttcaagcgattctcctgcctcagcctcccgagtagttgggattacaggtgcatgccaccacacccagctaatttttgcatgttttgtagggacggggtttcaccatgttggccaggctgttctcaaatacctgacctcaggtgatccacccgcctcagcctcccaaagtgctagaattacaggcatgagccaccgggccctgctcacacactttagtttgaatgccgcagaagcagacccccagacaagggctcaagggcagggagtttgttttgaagctgatcccaggcagtgctggggaagggatggaagcacggagggaggttatgctggctgccacagctgtggacacccggacttcagtcgcctggggatctccttgggccagcgtagaccacacacctctgggcgacctcacacagggagtgaggacagttaccatcaaattccctgccattatcagtcacgggacacaaagtcttccacgctttccgggctcacaggcaggggattcacatgcagccagaaggcctcaggtaaagacaggtgttttcagggtccagctgtcatgtggaggtgaggcagaggggagatggggatggcagcaacagcctctgctgcatgatggggataatagcaaaaatcacccgtgcattcatcacttagcaagtggcaggcacgtccaaagcagtccccgaggcttgccccacttaatctacccatggccctatgtggtaggtgctgtcactgcccccattttgcagatgagaaaactgaggcacagagaggttaagtgacttgcccagggtatcatcagtgtaaatagtgcccttatcactaaataacagctactcttttcactgttcatattattagcatcatctctcgctgttctccttcttcagtgacttggtttggaacccagtgagaggaacaaaagggcaaagccaagccttgggttcaagggggcttacttgctcccaggagctcagtgtggcagaacggggatggggggcctagagcccatagtctccagcctgcacagggtgggggatgcagacctcaggccccatggcccatgcgtgtcccctcgcacccacccccagcctcctggaccatggccgctcttgtgacgacgtccaccgctcccgccatggcctcagcctccaggaccaaatggtgaggtcagtgctgccctggaccggggtgccctgagaactggggctccttgtgttgccccccaatgtggttgccttccagtcacctgccttctctgggcctcagttcccccagctgaaagtggggagctccttcaccccgggagggtccagccacagctcctccttctgatggcttggcctcatcccctcttccaggaaggccatttacggccccaacgtgatcagcataccggtcaagtcctacccccagctgctggtggacgaggtagggctgtccctgggtcttgccccagccctgcctggcgtgctgtgtgaccttggcccagggcttgcctcctctgggccactttacggtggcaaccagaccagctgtccccttctccatagtggatcgtcatctcagaacctgccgcagtcagcctagccagagagaccaggtccaggaattggaggttctgcccaaggcttgggtcacagattggggccccactcatagggattggaggccaagaggcaaatccacgcagcctgagcatctatggggtccccagagacacgccctagagcctgggtcctctctgtgcgtcctccactttcatgctcccaacagtcccgtgggttgggcctgggactgcactgttcacacctgagaaatccaagcttcagttggaggctgtgacatggccaaggtcacacagggacaaagagaagccagtgacctggacacaactagaataaagtgtgaacatcccagccctctgatcgggggcaggcaccatgaaagagatctttgagtctggccccatagaaatcagtctgtcacttagaagctatgtggttttttgttttttgtttgttgtttttttttttgagacagagttttgctcttgttgcccaggctggagtgcaatggcgtgatctcggctcactgcgatgtccacctcctgggttcaagtgattctcctgcctgagcctcctacatagctgggactacaggcgcctgccaccacgcccagctaatttttttttttttttgtatttttagtagatacggggattcactatgttggctaggctggtctcaaactcctgacctcagatgacccacctgcctcggccttgcaaagtgctgggattataggcatgagccaccgcacctggctggaactatgtggttttaggccagtggcttcacctgtccatgccttggtttcctcatctgtagaatggagctaatggtggtaccggccttgtagaattgtcattgccattgtatgacacttagataaagcacttggcgtgtagtgggggttcagtaaatacccttatcctatttatttatttgtttattttttttgagacagggtctccctctgtcactcaggctggagtgcagtggcgcgatctcagctcactgcaccctccacctccccagcttaagtgatcctcccacctcagcctcctgagtagctgggagcgtaggcacaggccaccccatcaggctaatttttgtattttttgtagatatggggtttcgccatgttgcccaggctggtcataaacccttgtcctctttagagcggagaaactgagggccctggggatgtctggttgggtggggatgggattgaccaggagaaaggcctggctccagtcctttggcagccactgggccctctgctcccatgggcacaggagacccagcctgtggctgggctgccctgggggacgcggccctgacgctgcctcccgcccctcccccaggcactgaacccctactatgggttccaggccttcagcatcgcgctgtggctggctgaccactactactggtacgccctgtgcatcttcctcatttcctccatctccatctgcctgtcgctgtacaagaccagaaaggtgagtgccataaggtgggtggggacgggacaggtgggtccccaggggcccccacccactcacggccctcttgtcccctgcccacagcaaagccagactctaagggacatggtcaagttgtccatgcgggtgtgcgtgtgccggccagggggaggtgaggagctagggcccagggggcgggggcaggagtgggagggtgggggggcatggctggggctggccccacctagctgagctcctctcctgcctgcctgcagaggaagagtgggtggactccagtgagctagtgcccggagactgcctggtgctgccccaggagggtgggctgatgccctgtgatgccgccctggtggccggcgagtgcatggtgaatgagagctctctgacaggtgagcccccagcccctggcctgcagcttccttcctcccctgccatccaaccctttgccctgcggcaaaagttttcatttgagtttccttttccttttttgtttttttgtgagacggagtttcactctgttgtccaggctggagtgcagtgacatgatctcagctcactgcagcctccaccccccaggttcaagtgattcttgtgcctcagcctcctgagtagctgggaccacaggtgcataccatcacgcccagctaattttttatttttagtagagatggagtttcactatgttgcccaggctggtcttgaactcctgacctcaggttatctgcccacctcggcctcccaaggtgctgggatttcaggcgtgtgccagcgctccgcctcctcttcctttttctctcaagcaacaatcccagctttaggacttgctaacctcacacccctgggccgttaccacgtatcatctccgtgcctcagttccttcttctgtaagatggctgtcagtcactcctcctggacagagttgtgcaaagtgcttaggagcgtgagaggtgcagcataaatggccagccacccagtgcatctgggctatttctcctttttttttttttttttttttttttgagatggagtttcactcttgttgccccggctggagtaccatggtgcgatctcagctcactgcaacctccacctcctgggttcaagcgattctcctgccttagccacccaagtacctgggattacaggtgtgcgccaccatacccggctaattttgtatttttagttgagatggggtttcaccacgttggtcagactggtcttgaactcctgacctcaagtgatctgcccgccccagcctcccaaagtgctgggattacaagcatgaaccatagcacctggctgcatctgagctgtttctataccagtgcccaccttcaggtcataaagattccagatggcacaggagagtgggaagccctctcccagagtgagagactgcggtccccattcactaccccacagtccccttcccttcccctccccagggcagccactgtgaagggtgtgaggtgtcttccacgcctttttctgcattacgtgtgtgcacatgggctgatttgcctctccttttgttctgaacgtgggattgtatgctgtgtattgttccatactttgctttttctcctggcatccttccacaagcacggatggccccacctcatggctgcatgagagtccacaatacggatgtatcgtaactgactcaaccggcccgctcgccatgagtatttagaatgtgattttccagccattgcaaaggacgccacaggagcagctttgtcctgtgtctcttgatgtgtgcaagtatttctttctctgagatgtgttatattttggtggtagatactggagagagtttactaaaaaccacaggatagtggtttttttccagggaagttttctggctggcattgtatttgtatcacaaatcgtaggccaggcgcagtggctcgcacctgtaatcccaacactttggcaggcagaggtgggtggattgcctgaggtgaggagttcgaaaacagcctggaaatcatgttgaaaccccatctctaccaaaaatacaaaaaattagccaggtgtagtggtgcacgtctatcgtcccaggtacttgggaggctgaggtgggaggatcgtttgagcctaggaggtggaggttgcagtgagccgagatcgcaccactgcactccagcctgggtgacagagtaagactccgtctcagaaaacaaaaaaaaagtagtaattgtgatcagtatgatttgtgggcacacgccctgagccctgccctccacaaactgtccacacatacttcatctgctcatctcttgtgaggcagacatggcaggattgtctgactcccttgcaggaatgtgcacacagtaggtgctcaatagtcccagcctgcaggcattcagtaagggagtgccactgtttgctaggcagcctgcccaggacttcacagggccatggcgagcatgcagtgcttttctcactccaactcatggaaatatttgccccctccatgtaaatatttctctcccctccccctcctccttccccctccccttccttaccccatcccctcccctcccctcctcttttgagacagagtttcactctgttgtccaggctggagtgcagtggcacgatctcggctcactgcaacctccgcctctctggttcaagttattaccctgccttagcctcccaagtagctgggattacagatgcccaccacaacacccggctaatttttgtattttagtagagacagggtttcaccatgttggccagcctggtcccgaactcctggcctcaagtgatctgcccacctcagcctcccaaagtgttgggattacaggcgtgagccaccgcatctggccccttgtaaatatttctgttggttggagttagaaaagcactccatgcatgttataaaataattccagcagaaagagaacgactcccccaccctgccccactgcacacatgatgcccacacatgctctgtctgacccacccccccccgctggttccagggagctggctgccacctgcttccaggagtgtctccctgtgcctttatatctccgtcctctctgagcctcagtgttcctctctgtaaaatggggctgtgatttcttgttcacacctggttacagagttaactgagacttagagcttgtgggacaattctacacagaactcctggtttgctggtgggagggaggggtgtggagtggtcctcacaccacgttccccaccaggagagagcattccagtgctgaagacggcactgccggaggggctggggccctactgtgcagagacacaccggcggcacacactcttctgcgggaccctcatcttgcaggcccgggcctatgtgggaccgcacgtcctggcagtggtgacccgcacaggtatgagccgggaggctgggcttgagagagatcccgggctcagcacccttgggagaggtggagtgaggcagggtgggacctggaaccctggaccccacgcccacctctgctgctgccctgctgtgggacctcgggccagttgccccccatctggggtctgagcattcccatcttagcagaagttgggccagactaaggccaagcattgcaagatctggaggagccgccggggttacagtgctggagcgggcagggatgtagcgggcaggcaggagccttccctgtgtctggattttcagtggaaccacccagtgtttagatgctatccactagttccttgtttaaagcccttaaaaagcctacaagagccgggccagacctgttaggactccacactgctgatggctaatttcacaaacatcatgtcttgcaactccagaggcacgggtcgggagggctaggggtggggaaggcctgccctcaccctggcttccctgccttggggtccccgcctcctccccagggttctgcacggcaaaagggggcctggtgagctccatcttgcacccccggcccatcaacttcaagttctataaacacagcatgaagtttgtggctgccctctctgtcctgggtgagtggccccctgcaccctcctctgcccatagccccccccacctgggtcccaaatcccactcagtccttcgctgtccccacagctctcctcggcaccatctacagcatcttcatcctctaccgaaaccgggtaagccttgggggtggggtggggggtgctgccagcagggcccaggggccaaccagccaggtgctcacattcatggtgccccctgccaggtgcctctgaatgagattgtaatccgggctctcgacctggtgaccgtggtggtgccacctgccctgcctgctgccatgactgtgtgcacgctctacgcccagagccgactgcggagacagggcattttctgcatccacccactgcgcatcaacctggggggcaagctgcagctggtgtgtttcgacaaggtggggccgcaggtggggttggtgcaggggagcgggacagccacaggcgccccagtgaggcctccacacccgcgttattctctcagcagcacccacaggatgccaggtcctgtctagggatggaaacccccagaggatccaccccatcccactcctgccctcactgggctcacggtctggcagatgaaatgtctagaatcatgtattcatgtgttcaagaactggtggggggccgggcgcggtggctcacgtctgtaatcccagcactttgggaggctgaggcagatacatcacttgaggtcaggagttcaagaccagcctgaccaacatggcaaaaccccgtctactaaaaatacaaaagttagccaggcatgatggcacatgcttgtaatcccagctactcgggaggctgaggcaggagaatcgcagaggttgcagtgagccaagatcatgccattgtactccagcctgggtgacagagcaaaactcaaaaaaaaaaaaaaattactggtggggacctggggccctagtgtgcatcccgtgctgctcccaacccttggggcccagcagtgaccaacacaggcatccttgtggtcactggagtgtgtgtgtcccccaccaaagtaagtgatccaggagtgcacaaaggagctgctggggctgaggagtgggcagtgggttttaggaaggaagccagtgggatagcttgatgggttctagatggggacacttccttagagagaaggcagtcaaggaagccccctgagcaggtccctcagtgacctcagtgaggggcaggtcgaggagaagcaagggtaaaaggtgggagtgtcatagcacagatgtaccgtgtgcctggggcacagggagtggcgtggcacagatgtgctgcgtacctgagcacagggagtggtggagcaggacagggccgggtaggcagtggcctggttgacagaggctaggtgacattcagaggctgtcgggggccacagagcgcttttaaactggggagggggcccagcgcagtggctcatgcctggaatcccggcacttcgggaggccgaggcgggtggatcatgaggtcaggagttcaagaccagcctggccaatatggtgaaaccccgtctctactgaaaatataaaaaattagccaggcacggtgacatatgcctgttgtcccagttactcgggaggctggggcaggagaatcgcttgaacccgggaggcagaggttgcagtgagctgagatcacaccactgcactccagcctgggcaacagagtgagactccgtctcaaaaaaaaataaataaaccggggagggggatgaccagattcttatagttcccaggctagccaaggagccagacgcgtacttgggcagttagagtctaggatggggaacgcaggcactgactcatgcgctcattcaacagatatattgaggctgggcgtggtggctcatgcctgtaatcccagcactctgggaggccaaggcgggtggattgcctgaggtcgggagttcgagaccagcctgaccaacatggtgaaaccccgtctctactaaaaatacaaaaattaggtgggcgaggtagcgcgtgcctataatcctagctgctcgggaggctgaggcaggagaatcacttgaacccgggaggtggaggttgcagtgaactgagattgcgccactgcactccagcgcgggcgacagagcaagactccatctcaaaaaataaaaataaataaaaataaaaataaataaataaataaataaataaatgagagagagagagcgagccaaccgtgggccgggtccttaaccacaatgcacaagtgtggggaagtgaagaggccatgggtaggagcccagagcaaaccacctgccctaacttgggagttaaggaggaagacaccctggaagagatgatgctagacagagagacggtgggggctggggagggggaccccagcagagggaatcacatgtgccaaggacagcagtcaagaaaggtcatcttttggctccagctcgagttcctggggttcccatagggtccgccgggcctggggtttggaggcccagctcagcagggtacccccatcccaggactcatcgctgccccacccacctgtctcccacagacgggcaccctcactgaggacggcttagacgtgatgggggtggtgcccctgaaggggcaggcattcctgcccctggtcccagagcctcgccgcctgcctgtggggcccctgctccgagcactggccacctgccatgccctcagccggctccaggacacccccgtgggcgaccccatggacttgaagatggtggagtctactggctgggtgaggaggccaagcaggtcagccccctgcctctgggcagtggggcctaacgaatcccaccctgtcttccctctccatctttcagggtggtctcttattatgcccaccattaataataataggccaggcgcagtggctcacacctgtaacgtggctcccggcgctttgggaggccaagacgggaggatcacttgagcccgggaccccagcctgacctacatggcaaaaccccatctctgccaaaaatacaaaaattagccgggcgtggtggtgcatgcctgtagtcccaggaggctgaggtgggaggattaattgagcccgggagggcgaggctacagggagctgtgatcacgctactgcactccagcctgggtaacagaacgagaccctgtctcaaaaaataataatgataggccaggtgcagtgactcatgcctgtaattccagcactttgggaggctgaggtgggcagatcacctgaggtcggaagtttgaaagcagcctggccaacatagtgaaaccccgtctgtaataaaaatacaaaaattagccaagtgcggtggaacatgcctgtagtcccagctacttgggaggctgagggcaggagaatcatttgaatccgggaggcagaggttgcagtaagccgagatcacaccactgcactccagcctaggtcacagagtaagactctgtcttaaaataaaagtaacataataataatggcaaggcctcaggctgagtgcctactatgcgccagcgcacggccacagaggcctggtctcatttcctcttccccaagccctagcaagcaagctcaaatgttgcttcacggatgctgaggctgggagatttggagtgacgtattccaggtcacccaacagcttgtaagtagcaaagctagagtttgaatttgagtccaccgggctccaaagcccacattcttaacccaccattcagtctcccatgaaggaagtcttccctgagtctagctcaaatctctctgtgagccaaagcccccagacaccaaacttccctgcctgcctgccaggtcctggaggaagagccggctgcagactcagcatttgggacccaggtcttggcagtgatgagacccccactttgggagccccagctgcaggcaatggtgagctgaggggggcctgttgggtgcagggcagaggggtgggctccccagccagcacctcagctgcctctccaaccctgcaggaggagcccccggtgccagtcagcgtcctccaccgcttccccttctcttcggctctgcagcgcatgagtgtggtggtggcgtggccaggggccactcagcccgaggcctacgtcaaaggctccccggagctggtggcagggctctgcaaccccgagacaggtgcagggggaagcccctgagtccccctggttgggcattggcacagaatggggtgggtacccagcctctgtccctgccatcccctccttgtgacacctgcctctccctggcagtgcccaccgacttcgcccagatgctgcagagctatacagctgctggctaccgtgtcgtggccctggccagcaagccactgcccactgtgcccagcctggaggcagcccagcaactgacgaggtgggcctgtctcctgtcccacccactctgaggactaggcagagggaggctctcacgcaggcagagcccaaggaagatgccctgcctggtggctgggagaggggccctggccactgcatgacctctgatccaggtctgcccaccctccagggacactgtggaaggagacctgagcctcctggggctgctggtcatgaggaacctactgaagccgcagacaacgccagttatccaggctctgcgaaggacccgcatccgcgccgtcatggtgacaggtacaatggcatgtaggggcccgggctagcagggcagaatccgccccttcctggcagagaagaggggcaccagggattcctttttggggcatctttttgggcccttgcttcaggccaggtcctttttaaacatttcgtgaatcttcacaatatcccccccgcaagtggtaattgtcacccctgtttgacagatgaggaaactgagactcagaggagtggagtgacttccaaggaacccatgtgcgctgtcagacagcctgggttccaggtggcacctctgagaaatggggataatgatgtcagcctcagaggctgtgacaagctcaaggagcaggaagagaaagattctggccgggcacggtacttcatgcctgtaatcccagcactttgggaggccaaaggagaaggatgtcttgaaccctggagttcaagaccaacctgggcaacatggcaaaactccgtctctacaaagaatacgaaaatggccgggcacagtgtctcacgcctgtaatcccagcactttgggaggccgacgcgggcggatcacttgaggtcaggagttcgagaccaacctggccaacatagtgaaaccccgtctctactaaaaatacaaaaaattagccaggtatggtggtggatgcctgtaatcccagctactcgggaggctgaggcaggagaatcacttcaacccgggaggtggaggttgcagtgagctgagatcacgccatttcactccagcctgggcaacagagagagacccagtctcaaaaaaaaaaagattctagctagggtgagacagcaggagctaagaggtctgtgtccttgtcctccccgcccctgcacacacacatatgtgcacacacattcatgggcacttggcagcagagtcacacagcagtaaggagtatatgtagcctgggcacatggctcgtgcctgtaatcccagcactccgggaggccgaggcagggggatcacctgaggccaggagttcaagaccagactggccaacatggtgaaaccccatctctactaaaaatgcaaaaaaaattagcctggtgtggtcgcaccctcctgtaatcccagctactcaagaggctgaggcaggagaattgcttgagcccaggaggaaggaggttgcagtgagccgagatcaagccactgcactccagcctgggccacagagagagactcttgtcttaaaaaaagaaaaaaaaggagtatatgtggagctccagcccacggctccaggttctcctaagacccttcaatgcctggatctacagatgagaaaactgaggcaaagggatgttggtaacctgcctcagctcacttggctggtggtggcagacggatttcatccagcctgttttcccatctgtaaggatcaggatgaggatggcctccccggatagcctcagaccctcaccttgccccataacccccaggggacaacctgcagacagcggtgactgtggcccggggctgtggcatggtggccccccaggagcatctgatcatcgtccacgccacccaccctgagcggggtcagcctgcctctctcgagttcctgccgatggagtcccccacagccgtgaatggcgttaaggtgaggctaacccagagttccagctgtacctcacccagtgaccccacccctgtgtcacctgacccaggccccaactctccagggtgggcagggggagctaagctgagcttcctgggcccccaggatcctgaccaggctgcaagctacaccgtggagccagacccccgatccaggcacctggccctcagcgggcccacctttggtatcattgtgaagcacttccccaagctgctgcccaaggtagggccgcccccagctccctggccgccctgcgcctcccctgctctgtctccttcctcacggctcgctctccctggtgggtgcctcagccctcccccatctccctgtgctcccaggtcctggtccagggcactgtctttgcccgcatggcccctgagcagaagacagagctggtgtgcgagctacagaagcttcagtgagtgctcggcagagggtgtgggcaagggcctgcggagactgagcttgtccgttcgtctgttcatctgtccttccccagggccctgtctccctcctcaggcaccagagagctgtcacccctcctcaccaaaagcaggcaggctctcccaggtctttcatgctaaaaataataattgtaggctgggtgcggtggctcattcctgtaatcccacctctttgagtggccgaggtgggaggatcacttgagcccaggagtttgaggccagcctgggcaacaaagtgagaccccatctcttattaaaaatttaaaaattagccaggtgtggtgacacaccggtcatcccagctactcaagaggctgaggcaggagggttgcttgagcctgggaggctgcggctgcagtgagccatgatcacaccactgcacttcagcctgggcaacagagcgagactccgtctcaaaaaatagtaataggccaggcgcggtggctcatgccagtaatcccagcgctttgggaggctgaggcaggcagatcacctgaggtcaggagttcaagaccagcctggccaacatggtgaaaccctgtctctactaaaaatacaaaaattagttgggcatggtggcgcacaccagtaatcccagctactcaagaggctgagggcacttgggcagcagaggaggttgtagtgagcagagatcacgccactgcactctagcctgggcaacagagggagactctgtctcaaaaaataataggccgggcacggtggctcatgcctgtaatcccagcactttgggaggccgaggcgggtggatcacctgagatcaggagtttaagaccagcctggccaacatggtgaaaccccatctctactaaaaatacaaaaaattagccaggcgtggtggcgggcgtctgtaatcccagctacttgggaggctgaagcaggagaatcacttgagcccaggaggcagaggttgcagtgagctgagatcatgccattacactccagcctgggcaacaagagtgaaactccgtctcaaaaaataataataataatgataataataataataattgcatctattcactgagcgcctcctgtacaccaggcaccatgtggcattaggggcccagctgtcatcatattctgccagcccacccatggggtggtggggtaattccccaggccacacctgtccacacctctcttcaggtactgcgtgggcatgtgcggagacggcgccaatgactgtggggccctgaaggcggctgatgtcggcatctcgctgtcccaggcagaagcctcagtggtctcacccttcacctcgagcatggccagtattgagtgcgtgcccatggtcatcaggtaaggcaggcagggaccggtgggtgagggctcagcagggctggtcagccaacctgggtcccctaatgtccgtgccctgccacccagggaggggcgctgttcccttgacacttcgttcagcgtcttcaagtacatggctctgtacagcctgacccagttcatctccgtcctgatcctctacacggtgagtatctgcagagctccgtacccagagccgtcccaggactagggaggggacacagccctgtgccttggagctggcaggtcccagaatagatgacgtgggcccagatcctgaccctgccactctccggctgtgtggttggagaggtggcaaggcttgggggagatgagaaaaacaccaggcacggagcctggtacccactaggtcctcacaaatggcagcagctgtcatgggctaacatcttgaccgcaactctgggagctccccaatctgcagggaagactgaacggaggcagggccaaaaccctcgcccccgccccatccccacaggtctgcccatttccccagatgcacttgctttgccccataccttggctgtacctcccacaccctacttggaggagctctcccctcccctgctctgggcatggcctgctcacccccagcgaatgaggtgacactgcagggcggcgcacatcttatacttgggtctgtccctgtgtctgcctgaaagcgaggagctccctgagggcaggaactgtgcatgccctggtagctatagggactccgcaaggcagagccgaagcctccccttcgggccgggagtttgttacagggagggaaacctcccctcagatttaggcccccaaggtcagcacaggtgccctttccatcagaccaggggtttgtctcacatcaagagcggcacctcctccgctgggctggcaggagagtacggcccccattagactgggggatgccttacccatcagattccttcggggcaggggtggggcctctgctatcagactaggggctgccagggccaggtcttagtttcccctctgtcctcccttccctgtggcagatcaacaccaacctgggtgacctgcagttcctggccatcgacctggtcatcaccaccacagtggcagtgctcatgagccgcacggggccagcgctggtcctgggacgggtgcggccaccgggggcgctgctcagcgtgcccgtgctcagcagcctgctgctgcagatggtcctggtgaccggcgtgcagctagggggctacttcctgaccctggcccagccatggtgagtagggagctgactgaccacccccatcccgccccttccctgtccaccccacgttcgttccctgacccccatccctgtacccccaggttcgtgcctctgaacaggacagtggccgcaccagacaacctgcccaactacgagaacaccgtggtcttctctctgtccagcttccagtacctcatcctggctgcagccgtgtccaagggggcgcccttccgccggccgctctacaccaatggtgccactgcgggcgcgggcgggagatgctggcggagggagggaggagccctggggtgctggggaggcagatgggagagaggtgccggccgagtggaagactggcgtgcacacgtgtgtctgtgggtgccgggggggcgtggctcctgcctgagagactctcctgctcccagtgcccttcctggtggccctggcgctcctgagctccgtcctggtgggccttgtcctggtccccggcctcctgcaggggccgctggcgctgaggaacatcactgacaccggcttcaagctgctgctgctgggtctggtcaccctcaacttcgtgggggccttcatgctggaggtggggcccgccctgggtctcagcagcgggagagaagggaggtgggggtgcattgaccccagctcagccccggctgcccctgacaccctccctgccctttgcagagcgtgctagaccagtgcctccccgcctgcctgcgccgcctccggcccaagcgggcctccaagaagcgcttcaagcagctggaacgagagctggccgagcagccctggccgccgctgcccgccggccccctgaggtagtgcaggcccacgggcaccccagacactggaactccctgcctctgagccaccaactggacccctctccagcaacaccaccgccaccacctcccacatccctgaggttggcgactgtctacactcctcccccgagaccacccccaccctggggaagcgttgactactgtcccctaccttggaccatcccgcgtaggggtggcagcccccagctcccctcagtgctgctgtcagtgtagcaaataaagtcatgatattttcctggctctgctgtgcctgtcttgtacctggcaccatagaccctcccacctgcccaggaggaaatgcacatacccccgggtgcccagctggcagcccctgcacgtgtctgcccctggaaccccctggggggctggtttttcaggctggtttttcagcctgacaaccccctggaaccccctggtttttcagactccattggccaactcccctctctgggcctgtgttccctcatctcacagtaataatgtttcctctgtgtccagcatgtgcctggatattccgtttagcttttttttttttttttttttttcttgagatggagtcttgctctgtcacccaggctggagtacagtggggtgatctctgctcactgcaacctccgcttcccaggttcaagcgattctcctgcctcagcctcccgagtagctgggattacaggcatgtgccaccacgcccagctaaattttgtatttttagtagagacagggtttcgtcatgttggccaggctggtctcgaactcctgacctcaggtgatccgcccaccttggcctcccaaagtgctgggattacaggcgtgagccactgcgcttggccccatttagcattttacacacattgtcatgtcatccttccaacaactgtggtactattcccattttacagatgaagaaaccaaggcttagaggttacacaagtagtcagagtggggccggatagctttgactccagcttcgatgttcctaaccctcctaccctcctttggaggacaaggagatgtaggcttgcctgggaggcatttgctagggggcagctccctctctcccaccttaccccctccccgtcccaccccagcatcctgggacatgtttgtgggcagttccttcctcagatgaaatccaggctcggagcccacatctcccagccagaaccacgcgcatcatccctcagggaagggtgggtgcctctgagctcatctcaccagcgggcccctggccaagcccctctgctctagagaggcagcttggccgtctggctcatctgggcaggggagaacaggaaagaccggctgtttcctgccttccaaaagccctggccaacctcattcctggaacccctggtgctatccccaggcctgccagagtaggggctgagaaaacgttgaatcatgctggggagaagggatgtgggtgtgaagatgaaagtcctgccaggaggcacatcacagtggacctctgctcctggcactgtgttgccagccagcgacggttcagggtggtagatgctgtttaagaggaagccacagagaggcctgggttcaaatccctcctctacccttagctgattattcatgaatctgttggacaggtgtgtgccaggcaccaggactaactcaacaaactgaataaaacgggacaaaaacatggtctaaccctgcgagcagttcaccatccagcgtgaaagcctggcagggaaggagcacatctccaaagacgtagtgggagcacagcaaccacagccccatcccctcccctgcccaaagaaacagccaggggaatgggtagaagcagcagagaggacatgggagccaggacacgaattgtcagctttagcccctcagtttcccagtttttcttttcttttcttttttttttttcagacagggtcttgctctgttgcccaggctggagtgcagtggtgcaatcgtggctcactgcagcctctacctccccaggctcaggtgatcctcctacctcaacctcctgagtagctgggactataggccagcaccaccacacccagctaatttttgtattttttgtagagatggggttttgccatgctgtccaggctggtctcaaacccctgggctcaagcggtccacccgccttggtctcctaaactgctgagattacaggtgtgagccactgcacccaacctccctccttttttcaagggtaggggacagcatttctgctgggtgagttcctctcttttgccagtgggattgctcctggcagcagtggggtctaagggcaggcagagagggctgggctggcctggcctgagggcccacctctctccaggtgacaaaagtctctgctgccctgcaatagacactggggggcggggcatgggaatgaaggaggcacagggcatatttactccctccctaagactcagagtctaagggaggtgggggaatgactggcgatgaagagatcagatggcaagggtctaaatcaggggccatcctcatctcctcccagcccgcagcccctacaactctcactcccgcctcaggcctaggctcctgggcagggctgaaggctgcccctcacgcagaggatctgcacccccagccagcttctccgggaagagtttagtgtacagttcactcattcattccaccaatgtttgctgaactgctgctctgagccgggctctgaacttaatgagcaaaactgaagatgagcaaaaacagccttggtcctggccttcacggggcaagatgacagtctcatcgggaagagggacagggctcagatggtcacagacataggccaacaagacaactgcaagcagtaaagctagaaagcacaaaaaaaggaaaaagggaaggcccctctgaggaagggagggtttgatctgtgaccccatggaggagacctcagccagtgctcgggaggaagaaacgcctcagtgtgggagggagaggggtttgggagaaaacccccaaaggccagtggctggaggaggaagaggaggcagagccaggctgccataaagggccggggccctggaagccacagggaagttgagcctctaacctgagtgaaaggcgatcagtagaaggggcacgatctgcgggggtgagggaggcaggacccacgtgggagagcccagagtggaggctatcgcagagcccaggcaaatgatggtggtgtcaactaaataagaaatcagccttttgaccaggtgcagtggctcacgcctgtaattccagcactttgggaggccaaggtgggtggatcagctgaggtcaggagtacgagacgagcctggacaacatggagaagcctcgtctctacgagaaataaaaaaaaaaaaaaaaatagccaggcatggtggtgggtgcctgtagtccccactactctggaggctgaggcatgagaatcgcttgaacccaggaggcagaggttgcagtgagttgaggatgcaccactgcactccagcctgggagatagcaagaccctgtctcaaaaaaaaagaaaaagaaaaaatccaccttttggccaggcacagtggctcatgcctataatcccagcactttgggaacccaaggcaggcggatcagctaaggtcaggagcctggccaacatggtgaaaccctgtctctactcaaaaaaaaaaagcaaaaattagcctggcatgctggcatgtgcctgtaatcccagctacccgagaggctgggttgggagaacctcttgaacccgggaggtggaggttacagggagccgaggtcacaccactgcactccagcctgggcaacagagttaaactccatttcaaaaaaaaaaaaaaaatcagccattgaaaaaattaaagttagttttattgagtcttactgaggactgcaccctgggagagggtttcagagagtttctgttagactgcgccaaagcagcatttcagcccacagtttagatacagaggcaggcggttctgtgtgtgctcagaagctatggtcaggcacggtggctcacgtccgtaatcccagcacttttggaggctgaggcgggtggattgcttgagctcaggagtttgagaccagactgggcaaacacggcaaaaccccttctctacaaaaaatacaaaaaaaaaaaaaaaaaaaaaaaattagccaggcatggcggctcttgcctgtagtcccagctacttgggaggctgaggtggaaggatcacttgagcccaagaggtgagctgtgatggtgccactgcactccagcctggatgacagagcgagacccggtctcattaaaaaaagaagaagaaaaatttacatcaaatgtcttcagaagctacactagtgcaaatctcgccaaggtttgggttcgaggatgcacctagttatatagattatagaggcataatcgtcaatcctgtcaggtgctatcttatgtacaggaaaaggcacagccaggatcatttaacttatattttctaacaatgcagtgattcaggcaagaggcgtgggagcctgtgttctgccctgcctgccatcttcaaggcatccttccgttgggctgcccccagtcactgagtcagggctttgtcagcttctgacaagcagaaagagcaaatgcggtttcttgggattgcaacttggtctcacagtggcttaggccagggtgggagcagtgaacggagtcacaaaagaaatttttcaggtagcattcacgggtgggtgctggattagatgcagggctaagggcaggggaggaagcctgggtaatggaaggctgcggggccaaggggggactgggaatcctggagggccaggtctgggggagagttaggaggtcgtgaatttggacttggatgcttgttgaagctgatgcatcttgaggacatttgtgggacacataggctgggtcagggctgaaagaggtgctggttatggccgggggcagggactcatgcctgtaatcccaacagcccaggaggatgagacaggaggaatgcttgaggccaaaatttcgaggccggaagttccagacgagcctgggcaacacagcaagaccctgtctctagaaaaggaaagaaagaaccgctggttgtggaagccagccatggcccagagctcagcagtgtaggagaggagggtgcgggcctgagagaggcagcaggcttggctggagaggcagaaggaaaaccaaggcaggagagtgtcctggaagctgggagaaggcagagggagatcgaggcttactttctggctgaggggcctagggtgagtcactttgggaggcttgatttcctcctctgtgaaatgggcaacacacctacccttgcccacctcacccccctcaccccgtcgacgtcgagtgaggagcagctgtgaggaggaggaagctttgcacagacgtgaggacggccccgggcgcctctaccccggggacacccccccccccaggagatggaaccccgagggcacggcgtggcggcccatgcgggcagctcgcgttaggacccagcggctccggggctggagggcgggcgccagccccgtcgggggcccggagggggactcggagcgggccaaggggcggctccggcgggcggactcggagcgggcggcggagtgacccggacaggtaggcgcgggcctggcgcttgggggccccggggggcggtcaggggcgtcggcgggtcccccggcgcgggggcgagggtgccaggctctctgggtcctcgatcctggggcagccgcggaggttcctgaaccccgcgccttcagagcggaggccaagggggcacctggaaagtttggggttgctctgcagagagaacgcgaattgggaagggcggggagcccgagtttggggggagccagaggtgaggtcgtcgggggatgggacatcttttgttctcccggggaggttggaatgtggcgggtggggtggggggggggggtccggtgggaatggccgagacagagacgcagagagacaaagagagatcagagacgggagcgcgagggcgcgcggagcaagtttccgcggctgattgttcccagctgtgcggcgctgcaacatctgggtttctcccgccgggacccctccccctgagcccggctctggagccggcagagccctccctccgtctgatgtctgagcgagcgtcggggccccctgtcccccacctcccaggacgcaggggagtcgggggtgggggaggccgcagctgtggaagaggccagaggtgggggtggggcagcctcccaggcaggtcctggcctcccgcacgccccaaaaccccttcgtctagaagagctcggagatgtggtcccgtgggaggagttcatgaactccacactgacttctctctttcctgcctccccgctagcccgtgggcctccttcccccaataagcctgggttcgggggccagtcctaggggaggaagactccccgcagggtaccgacaggcatcccccaacaccttgcaacccctcttgccccaattcagcgccttctgctgagcagcgggggctccgaccgacctgacggatggggagaagggcaaggaaggctctctgggtcttttcatccccctcccatgaggaggtcaagggttttcagaatggggtgtggggagccagctatccctcgcctctggggcagcttggtcctgagcttcgtctcccggctcccactccaccttagtgaggtgcctaatgcatgagaggagccagggggtcaggaggcctcaggattgagaggaaggagggaaagacctcctgctttctcccctttccctcccctctccctggactcccagtggggaaaatagaccaaagttggggtttccagctagctctctgaaaggacttcctgggttgcagccgggaggggccctcctggatggaccccgccctcgcagccctccctacagaaggctgacggacctgaggtggccctccactgagctggggctggatgtggggaaccggaggctcccccaagtcccaccgtgtagccaggactggaggctgggctcttgaatgtcaggagcctgatgaaagccacggaccccatgccctctccctccaaatgacacacacacttgcctacagtgtcagggggtgcagaacccccagcctgggtgatgtcacggccccttcagtgctgcctttctgggatccagaggagccccctcaggcttcactctcgtgcttcctgctgctgcaaatagcccgggtctcgtgagcctgtgatgcacacagccaggtcttgcgaggcctggaggcctggcaggagaggagtcttctgggagctgggagccctgcccggcctggccgctctgggggccgggcaggcccatgtgtatgtggtttcctgctgagcaggatgcttagggcccaggggctaattgggagcaggtggtggcttggcagaagctgctgagtccaggcggtgatgccggctggccagggctggggtcccaaggatgggcctgggttcagtgattcacgcagtcagtgccttggacacccagggagccactgggccagagggctgagcacgggtgtgggtgaggacagaatggcctgggctgggagcacattaggaatgtccccttagtgagcagggcagggtccgcccttccctgaccacatcaagtacacccactacacggggtttgcttgtcaggatcagccctggagctgggttggaggccttgtcccttgtgacctgaacacctgggtgggccagcagggactgggatgtccctccactccagccctcccatgcctggcttctattctgggtgccaccttctccagggcgaaatcaggggatcaaaggtgagctctgctgtcctgggtgtggccctgggtagagctctcccaccggtctttccccagctgtcctctctgacaccaccccggcctgcctctttgttgccatgagagctgcctacctcttcctgctattcctgcctggtaagtggctcctggggcagggggtagctcctcttatgtggggctgaggagtagggttagtagggggaattcatagtgagcctttgtcacgacttatgaccagaactcagctccccagctcccagggccttctgcctgcttggaccacagactggaccagccaaccctggcagcatctggaggcagctcctggcccttcccccagccttccacagcagcaggcaggcagggttctggagggcacgtcccaggcacaaggactccgtgggcacaaggcacaaggcctctctgggagccgatgtgcaggtgcaggggcacccaaggcagggagtccggatgcttgagttctagatccattcagggcccttctgctctatacagtcctgaccttgtgggggtccctactggccaaatgaagagaatcaatgaggaccacaaaagtcctagcagggccaacattcattcattcagcagcgatgtgttgagtccctaccacgtgccaagtgctgggctaggccctggggattcagcgatgaaccaggcagacacatcgttgctcctcatcatgctgccagtccagggaagggagacaaataggaaacaagcagacatgagaaactccagcatgtgctgagtgctggacagaaatcagcaggagggctggtgggctggaggtggggcggcatcttggcacagctgaaattccagggaagacctgaaggagctgagcaggcctcacaggcccagggagtgtcaggtgcaaaggctctgagggaggcaggagcatgtggagtcctaggagcagccaggaggccagcaacaggaaggggcagggtaaggtcagggaggtgacccatgaccagggtggggaagggtctttaccatcgaagaagagtctggatcctctaggaatctgcttgtggggtcctaggctcttatgggcctgaccttgtgacccccgcctccactctccagaagcgcctcgggcccccgttgcccctcccgatggggtaccctacatgctttgcctccccacagcaggcttgctggctcagggccagtatgacctggacccgctgccgccgttccctgaccacgtccagtacacccactatagcgaccagatcggtaagggccttgccgggtcaccgaggcctggctgctcagatgtgcctggctcagccagggaccgcactggacacgctgatgggaactctgggggttggtccctggctcaggagggaacttgtttgccccaggggctgggggattagccttactcccaccaattccactttcatctttgtttgcagacaacccagactactatgattatcaaggtaacgggctaggggtaggataggacgggccggcagctggggtggggagaccccctgggaggggtagagggagcagacccccttatcctcccctggctgcagaggtgactcctcggccctccgaggaacagttccagttccagtcccagcagcaagtccaacaggaagtcatcccagccccaaccccaggtaggccccagaccctgctcccacccgtctcagctcctgcctcacccctccccaccctgtcaaccctgggagtgggggtctgccagggctgggagaggtgactccccttgccctgaggagacccctcccagtgatgtctgcctacctctgtctccacaccagaaccaggaaatgcagagctggagcccacagagcctgggcctcttggtaagggctttcttgacagctggaaaaatggaggcacgccctgaagttggggtggagtagggggtggtgctggtgggctggaggtctttggcccttgcccatgtgggctcttggcagtgtgggcagtatgactgccgtaggctggcatcaccaggccccccaggcagctccaggaggtcccacctgtccccagtgtgcctggctggaggctaaattggcagcctaggaaggcccctgacctcacagatactgggaggggcagggagtgtgctgggggcttcctgccagccagagagactgagtggtgcacatgtggaggcgaggaagggccagggagtgcaggctggctgagcggtgccctccggctgccctagctgagagcttgaaagaacaaggtgtgtgtgtgcaggagaatccgtgtgctcactctcgtgtgggttggtgtgagcgctcctatgtgggcttctgtgagcgtgggcacgtctgctcgggagttggtatgggcttttgtggcgatgcatgggtgggtgcaaatttctgtttgaacttaggcttctatagtaagtgcggttgtgaattgatacgtgaatattacagccctgggaagtctgacaatgctgcgtgggtctatgtgggcatgtgtaggtatgggtgtctgcacggggcctgaaggtacaggggggactaggccctgtgagccagcctcaggtgggtgaggctgggggccgccccccactctgggctcctagtctgaccccacctgtcaccagactgccgtgaggaacagtacccgtgcacccgcctctactccatacacaggccttgcaaacagtgtctcaacgaggtctgcttctacaggtgagcacagatgggcagctgtcgggaggattccggagcatggggggctagagggcacaggggacagctctggcccgccaaggtgggagttggaggaaagatagtgagtccttaagttgagctcagttctgtggttgagcctgggccagggacctcctccactcctgggctccagtgccaggttctgtccgggctcccgtgccaggttctgtccgggctcccgtgccaggttctgtctgggctatcccagtgggattgggtggaagtggggctgagacctcccgtgccctgtccccgcagcctccgccgtgtgtacgtcattaacaaggagatctgtgttcgtacagtgtgtgcccatgaggagctcctccgaggtaggaaggccacctccccaagacctcccctgtccccacacccgcatcattatctggccacctagccacccacctgatgtttattcaacacatattatccaccaggcccacttccaggacaccctgagctcccctccttgctacttttcatcctcaaaacactcccatcaccagagttgggggaggggcagcggttcccatcacccagctccaccctgaccctgcctccttcctgcccccaatagctgacctctgtcgggacaagttctccaaatgtggcgtgatggccagcagcggcctgtgccaatccgtggcggcctcctgtgccaggagctgtgggagctgctagggtggtgctggcatcctgagtcctggccctcctgggatctggggccctcgggccctgcctgacctggtgcttttttccccatccccatgttccttttattctgtaaaaagttagtggactgcagccctgggggttgcaggctgcggtgcctcaggcccctccttcagcctgtggccacctctggggcacaatgggggctccccactgcccagtctgcccctcgggttgggggagtatcccaggcctctctgtgggacctgggcccctgacgggccttctcagcccgttttgaggacagacagtcccccgaggtaggctacatccccccaccccagctggtctgcttggatttcctacagcccccgtgggcatggaccacctttattttatacaaaattaaaaacaagtttttacaaaagatcaagtcactttttcggtggagagcacagaggggccagccaagtgcccccaacgcggactgtcctgagaggctcctgaccccttggagtgaacgatctgctcaggtgccctgtgcttccgcagtcccagccccaccgccttacccgccggctccagctctgccctgcccagaacgctgcgtcatgacagtgtacgcgcgcatgcgtgttgtgggaattgcacgggagatggaaggcttcagggacacagctttctgatgaccggggctgcttggtgagcacattgagttcccatcaccagaggaacacagcaaaaatgggaggccgcccatggggtggggggggcacagggtcaaggcaggcggactgacatccaaggcctttgtttgggaagttggggagatgggtgccattaagagggcaaaaaaagcggggcacagggactcacacctataattccagcacttagggaggctgaggcgggcggatcacttgaggccaggagttcgagaccagcctggccatggcgaaatcccgtctctagtaaaaatacaaaaaaaaattagccaggcgtggtggcgtgtgcctgtaattccagctactcaggaggccgaggcacaagaattgcttcaatctgggaggcggaggttgcagtgagccgagatcgcgccactgcactccagcctgggcgacagagcaagactgtgtctcaaaaaaaaaagggcaaaaacaagcaagccattgtaacacctccctccaaccagcatgtggggcctgggctctgtgtgtgaaggctcacacactcctgtttagccgtccgaacaggcatatgtggtggatgcaattcatatccccttcttagagacaggaaaactgagcccagagacgttaagtaacccacccaagggtcccacccacgggtccacagctatcagtggcagtgctgtggctgaatcggtcagctggactccagcaggtgaggatgagtgttaatttctccttcggacactgattgagcacctcctatgtgaacttccccagagccaccctatgcggttaggttcccattttacagatgagcaaactgaggctctaagaggttaagcagctttgctcaggatcactcagcggtgccagggcaagaccccacgttcacatccaaacctgcacttgtttgccatgctgcctggaaggcctgtcactgtcccgagggtgggcttggatctaaggaggggccagagaaaggggcaagaaagcataggctggaaggagtcgaggtgcacaggctgggcccagtcccaggcctcaacagccccatctgttccatgggccgggtgaccgagtaccccagaggcctccccatctgacattctgtgaggctggtaagttcccttcccaataccggcctctctgctctccctgccgcctccccaagcacccctccctagagggccccatccctcttgccccagaccctacctgtctccccccgacgtctcctccaattgtctagaaaagggacacagctgtacaaacttttttaaaaacaaggttttgttacaaaaaacagttctgaacagttaacattgtaaaaaggtataaaaatacagggactctgagcactctgaggaatttcccgacacatgctcttaactaaggcggagagatctctgggaagccgaagtcagggcctgggcctctgacccctgccctgggcctggtccccctcctctttcccacgatcccatgctccagggctgaccagagacaagggctctccccaatcctggctacggctcagcctctcaaggaggaactttaatgatctacagtggctcatcctagaagaggggggctggactgcaggtgttgctgggaagcctctccaggcctggagctggagtacccgtcctcagcactgccagcagagcgcctcctcatcccaccccagcttgaggcccccaagggaccgggctctgggtgggggggctgtccaaaagaagggtcctcccctgtcccaggcacaggggtgttctccagatgccagcaggagctcatttctctggggggccggagggtggggagaagggtgctgagctccttcgaagctcctgctgcagctggcccttcagtgtggacacctggggaagaaagggaaggtaaggccagccaggtcctcagcctggcttcagagaaagggaggcagcagggaacccggagggacacagtgccacagtttcaggaaaggtctggtctcactgagagccaggggctgtcctgcctttctcattttgttccttatagcagagtcaggcgtcttctgactgttgggcacctttgagggcaactccacccccattctttatccccatcatcacttgggtgggcgtggcttcagcccagacccaaggggtggacatgtgacccagcccggcctagcagagaagccttgcccggccgacaaggctggctcaggcatggtcaggaaggggtatgtgatctgagcgggccagtgagggacagccttaggacttctgcccctgctctcttctgagatgacagattgctgggagaacctgaggctggagctgctgaggccacctggccacccagggagaaggctaccctgagcatggagccagggggaacagagccatggcaggaggcctggggcccaggagcatcccgtggccccggtctggtcttggctgacaccagcgcagagccaaccccacccttttcggttacgggagccatcgactgcctatacccacaaggtcttgattgggtctctcctctttctgcagccccacacatccatcctggcccagccttctaagggggcctgcacacctgctcctccagcccacgcaccctctggcggtgggcccgctcccgagcctccagggtgcgctcagtctgcgcctgggcgctgcgcagccgctccacctcctgctgcagctccagctgctgctgctgcgcatccacctccagctgggccgggctgtggctctgctccagcaccaccacctgcgcctgcagggaggggctgtggtccgcgttctggcccagtgtgagtgtgtgtgtgcatgtgtgacgggttgtcaggtacctccctgggacacggccagtgcagagggggaaggcaggagagatccttgtgtgtcttccatcctgctggccctgacagtgagcctgcgagcccaggatgagtgcacccaatgacccccactcaggcaggtgcatggacacacacacacacacacacacacacacacacacacacacactcagacatcatacacacaggcacaaaggcaagcatgtaaatacctatctggactcacacaggtgcatgtgtatgtgcaaaggcccaactcccccatgcatgaaaacatctgtacacaaacacatattcataatacctagacacgccacaccatgcacaagattcatgctccatacacaagaatcgtcacatggattctcacactgctgcatggccacaacgtacatgaacccacaggctcacgtgcaaacaggcctttcgtgtcttttctgtacaccttagggagaacccatccctccatggcccgctgggtcactggaaggctcagggctcctgggggagggggttatgggccctgggctggctgggccatcagctccactggaattgctgagcactcatactagggatgaagttggggtcccggactgggtggggtcagacctccagctgctggatctgcctctgcgcctctgccagctccagctcagcccccgtgagggtgcggtccaggcggcccttctctgcgctcagccgcactgtgtcctcatggctacgaagcttctcccgctccacctaggcaggagagccacaggagatcagggtgccaggaggagcttactgagggggctcaggttcctgaaccctgatggaataacctaaccccaccagaggtagcagaccctggggatgtgcagtgggatccaccacggttaggccccagaggaagtgaggggagagcctggggagcagcctaccttgtccagcgtcctcctgagggctacacggtccttctccagccgcagggctgagcgctccacctcccgcttctcagcttccagctgagccagggcgcgctgcaggcttcccaggcgctcctgcagcagccgccgctcgtcttgcagcttctggacggtgttcagggctgcagcctcaccctcctgccgctgccgcagcacctgcaacagaagccaggcaggccccgaatccctctgggcctgagcatacttatctgaagcttggggacaatgaggctggcccactcacagagcaggcgacggtgaggcccacatcagagaattgtcacctgaagccaaacctgtctctctcagtctgtttctccatctgtataacaggactatgctctgaatgaaccatgtttccttactggaggctgcaccagggtttgggatgaggttgagatgggtgggaacgtccccaccctatcctagggcctcacagtcttggggacagagggggcacaccctggccctcacctcccgtagctgttgtagctggccctcggcctccacccgctgcagttccaggtcagccacctcgcctcgcaacgtctgcacctgctcgcccagggagctgctctgcttccgtgcctcagataatgcctgccgggcggcatccagccgttcctgggggacaggggctgatggtgcctggctggcctgggagccctaaggagtcctctctattctgtacctctggacaggtccacagagcataaaacaggcagtcatctcacctggagggtggggtgcacaccaaacccatccacggcctatccactgacctgcataaggtgggacccactcagaccccaactctccccaataaaccctgcccctgggtccccccaagtctataccagtagccttgtcttcttacgggacatacccagagcctcttctccttggctgatggtctactgggcccacgccctcccttcaaagcctgctctcattggctccaactgactgccccattggctggctctctaccagggcccccctccaagcctgctcttactggctgactctctcactgggcccaccccagccagaccctgggcccgagacctggagtacttggcggtcatgttcacaggcggtcagagccttctgcagatgcaggttcttgtcccgggtgctgttgaggctggcactgctctgggccagggcctctgtcaggccccgcaccttgtcccgcagggccccctcgctttcctccaccttagccagggccccattcagccgctccacggtcagctgcagggtccctgccttcacctcgctgtcggccacctggcaggaggacagccagaacaatcggggctgttcccatctggcctctatacctctgctcccactgtgacctccacctggcatgcccaatccacacccttcccacttctctctgggcctccatcattgagacccagtgttcctaagcactcctgctggctcagcctactgccacctgggccccatcccattgctggctaactactagtgcccagagtgccatcaacctagttgtctcagactccctggtctcctccctgtcctcactcctctctcctctctgctgtggaagagaaagggaaaccaccacgaccctaaaatttttttatttttgaccttgttgggtgttcaggcaaggctagccgtattatttaacattccagttagagctgagcttcctagcagtcaaggcaaaaagggaaatgagtgaaacctacatctctaacttgtcccagatgactcctatgtatgcagatgctgtcatcaaatagtcctgaattctaattttggctctgcctcttactagctatgggatcttagacaatgacatcacctctcagcctccatttgtccatctgtgaaatggggatgtgggtaatacttgcctcacagggttgttgggggactgcgtagtgcctacaaagctcttggcacagggcatgtgaacactgtggctgtgatttggggaggggcccacctgtctctgcagggaatccacccgatcctggagggcctgggcttgggcctcgcggtcactgaggcccaggcggctgcgctgcagctccccctcaagcgagcgccgctgcagctccagcttgacagtgcggctctcggaggcgtccagaacctccttcaggcgccgcttgtcgccctccagctttgtctcattggccttcatcttgctgatcttctcctgcaggtggcatggggctcaggcccagacgtccagtgcaccccgcagccctcccgcacacgccctggggcccttagggggaaagtggggagcagcctcgaagggtgacctacgtgacctggggccggcctgggaccctctggggtcctcggtctccccatgcgttcccaggatgagtggacgtgaagatcccagagcccaccttccagttttagcccaggccaatgggctgtggaacccaggactgccccttcgcgccctatggccccatttcatatctgtacagtagggacactggattggtcccagggtaccacaacctgggtgctcacaggagccctgaggaggggctgtagaaatgcagattccaaggcccttctcctgccccactgactcgtgcaaactgagctgagccggacagttctgagggggccctgctgttctagggtttcaggtggtgattccccctcccctgcccagggtcagccagtgaaaaaggcctggggagtggggatgggacaggaaggcagactaggggtcctcccatccctggtactatcctagagacagggtggatcaacagggggtgttattagagcctccccagcccctatcctgagcctggcccctctgccaccctgcccagagccccagccctgccctgtctggggcccccactctggctcctgcccagctttgttcctggcctcctcctgcagcccctgcggctgggcccatggccagggttgaagccgcagacacaacaatccagctaagctcggccccaggccagaggccttgggggcgggggtggtggggggaagcagtaatagagggacaggctggggagggcagaggggagctttggctgcactgtcaccaccagggcctgagtttcctgcccgacagacgcacatacacactggcacacatagctgtcccccaaacacacataaaaaccccagaactacagagacataaaacagaggccccctgagtaccacctgtgataagagcctgtgtgtgtcaccctgtgacgtaatcactgctcctccttttacagattaggaaaatgaaaaccaggcagatgacagcccaaagcccaagctctctttcttttcttcttcttcttcttttttttttcttttcttttttacagggtctcactctgccttgctagagtgcagtggcatgatcacagctcattgcagcctcgacctaccgggctccagtgatcttcccacctcagcctcccgagtagctgggactacaggcccacaccaccatgcccagctaagtatttttcatagagacggggtttcaccatgttgcccaggctggtctcaaactcctgtgctcaagggatccacctgcctcgacctcccaaagtgctaggattacaggcatgagctactgcaccttgaccaagctcttttttctacagcctagtgaccacaagtgacatgagaggatggagtctgaacatggtttcacagagtcacaggctggtcacctcagtgggttgcagagagactcaggcagacagacacagggagacacacataagagttagacactcactcgggtacacagattccccgtcgccccgctggccctcagctcctgcccacctggctggcccggagctcgctctcggtggcctgcaggctcctctccagtgtggccacctggtccagcgtggcccggcgctcccgctcactgcgccgcacactctcctcctgcagcgccagctccgcctggaccccgctcagccgcccatccacactgcgccgggctgtagccaccacccaccccgtcaggcatggccaagcacagccccgagacccaaaccaggtcacaaaatgtccagcctgcactccacccagtgcagggccagactgtctgcacccttcgtagtatgcgggcctgcacacaggtgaggctgtccaaggagggtcctcttggagacagccccgagtcaggtcatgggggccacggcaaggtcagaggccaatcccccggctcctgcctcaactgcccaaaacacaggagagagaacagggaccccgaggatcagactcaccttcctcactctcagccaccgccttctgcagctgcctggccctcgaggttgcgctgtccctctcagcctccatctcggccagctggcgattcagggcactggtctgggtccgaagttcgtcctgtagccccgacatgggggaacaaagacagacccctgctctgacaccctgcaacctccccagggccctccaggttccccatccagccatgcacacccaggcttacccgttctctctgggcactccgcagctcttgcaggaattcccggagggccccgcgcactgcctccgggtccaggtctggagaggctggggaggtggcaggtcctggagatggtggctgggacccagggctgcattctaaggtgctggggctgttgagcccttccccgcttcctagaagagaaagaagacttgctcagtgatgcagaagccacgggcctcccacacatctcactcactgtcatccctgcctttcccaacagccctcagaatcaagcccaacttctctgctatagcttaggggtcttcttgcccatcccagctgaaaccctctcaccctttacaaactggccaccctgcatctcccatgttctagaacattctttgtcccagctccagggcctctgtacatgctgctccccttctccccatggcctctctttgcctggcccatcctttagggccatccctctccctcagaggcctctctggccacaggctggattacagtgagctcatcccaccctcagcggggtctgatgtctgccacccccaccccgaccaggagcaccatgagggctgggcctcgtctcttccatccaccactgttcccagggcccagtgcaagggtggttgctgcatcacctcaagtctctccatactgagtgcccactgtgctaggcacttcatcttcacaacaacttcctgacaggtaaggaacaatttaccctcttcccaggcaaggctggcacaaagcagttaagtgatttgcttgttctgttgactgggtgtggtggctcacacctgtaatcccagcactgtggggtccgaggcaggcggatcacttgaggtcaggagttcaaggcaagcctggccaacatggtaaaaccccgtctctactgaaaatacaaaaattggccaggtgcggtgtctcatgcctgtaatcccagcactctgggaggccaaggcaggtggatcacctgaggtcaggagttcgagaccagcctgccaactagtgaaaccccatctctactaaaaatacaaaaattagctgggcgtggtggcatgcacctgtaatcccagctattcgagaagctgaggttggagaattgcttaaacccgggaagcggagctcgcagtgttcctaatcgaaccgctgcactccagcctgggtaacacagcgagactccgtctcaaaaaaagaagaaagaaaagactgggagcagtggctcacacctgtaatcccagcactttgggatgccgaggtgggcagatcacgaggtcagcagttcgagaccggcctggccaacatggtgaaaacccgtctctactaaaaatacaaaaattaggtgtggtggcgggcgcctgtaatcccagctactcaggaggctgaggcaggagaattgcttgaactgggacctgggaggcagaggttgcagtgagctaagactgcaccattacactccagcctgggcaacagagtgagactcggtcaaaaaaaagaagaaagaagaggaaagaaaagaaaagaaagtaaggaaggaaggaaaagaaaggaaaagaaaagaaaagaaaagagaaaaattagctgagcatggtggcccacgcttatagtcccagctacctgggaggctgaggtctggaggctgaggcaggaaaagcacttgaaccctggagacagaggttgtagtgagctgagactgtgctgcactccagcctgggcaacagagagagactctgtctcaaaaaaaaaaaaaaataaagaaaaaagaaaagaaaagaaaaagaaaaaagtgggcccggcacggtggctcagacctgtaatcccagcactctggtgggaggccgaggcgggcagatcacctgaggtcaggagttcaagaccagcctggccaacatggtgaaacccccatctctactaaaaatacaaaaaattagctgggtgcagtggtgcacgcctgtagtcccagctactcaggaggctgaggcaggagaatcgcttgaacccagcaggcggaggttgcagtgagtcgagatcgcgccattgcactccagcataggcaatagagcgagacttgggctcaaaaaaaaacaaaaacaaagtgatttggttgttctcaatgctgggaagtttcagggctgagatgggaatccaggcagcccgactccctggcagcactcctgcttggagtgatggcccggggaggtggagggggcagggcgggtggaaccagggcactacctggaggctggcactggaactgcaggacacgggtcctgccatgagcatcctgccttggccgcagagggacaccaaaactgctccgcagccatgaacttggtcaccacccaaaaggcctcgctcagaggttcccaaagaagcaggcctgcccctgggggcctccagctctagaaggtcccatcgtctcagggtaaaagtccccgtagaggcctataatgtctattggagcaagcccttcgtccccaaatctcacccccctgcttgatgctctgggactgctggcccctgctgtccacaggacaggcgcacctccactcaggacctccctactcgccccgagtccccctcccagctgctcgctcacgttctccccttacccatcacctcctcagtgaggcacctgctgcccccgcatgaactgccctagcccctaccttggctttgcccaattttttttttttttttttttctgagacggagtttcgctcttgttgcccagtctagagtgcaatggtgcgatctcggctcaccacaacctctgcctcctggtttcaagagattctcctgcctcagcctcccgagtagctgggattacaggcgtctgccaccacacttgactaattttttgtatttttagtagagacagggtttcaccatgttggctaggctggtcttgaactcctggcctcgagtgatccacccgctccggcctcgcagagtgctgggattacaaacatgagccaacgtgtctggccattttcatcatttttaagtgtacaactgagcggcatgaattacattcacactgttgtgcagccatcaccatcatctgttcccagatcatcccgactggaggtcaggagtttgagaccagcctgtccaacatggtgaaaccccatctctcctaaaaaaaaaaaatatacatatatatatatgtatatttatatacacacacacacatacacaaaaattagccaggtgtgccgggcacagtgtctcatgcctttaatcccagcactttgggaggctgaggtgggcagatcacgtaaggtcaggagttcaagactagcctgaccaacatgctgaaatcctgtttttttttttttttttttttttttttgagacggagtctagctctgtcgcccaggctggagtgcagtggcgggatctcagctcactgcaagctccatcttccgggttcacgccattctcctgcctcagcctcccgagtagctgggactacaggtgcctgccactgtgcccagctaattttttttgtatttttagtagagacggggtttcactgtggtctcgatctcctgacctcgtgatccgcccacctctgcctcccaaagtgctgggattacaggcatgagccaccgcgcccagccttgaaaccccgtctctactaaaaatacaaaaattagccaggcgtggtggcacacgcctgtagtctcccagctactcagggggctgaggcaggagaatcacttgaacccaggaggcagaggttgcagtgagccgagatcgtgctactgcactccagcttgggcaacagagcaagacgccatctcaaaaaaaaacaaaaagaataattaaaaacaatacagtgtaacaagtgtaagatttccacttagctgtatttggtatcctaagtaacctagagatgactgaaagtatgtgggagtatatggcaggatggaagctcagaaaatcagataaggagtcaaaggcattaagagccctccagcccccggtccaggaaaggcacggtggctcacgcctgtaatcccagtgggaggatcgcttgagtccaggagttcaagactagcctgggcaatatggcaaaaccccatctctactaaaaacacaaaaattaagcagacattgtagtgcacacctgtagtctcagctacaaaggaggttgaggtgggagaatcacttgagcccaggaggcacaggctgccaaggcagagggagccaagatcacactactgcacttcaactgaggtgacagagtgagatcctgtctcaaaagttgaaaaaaaagaatcaccccacttccccaaaaaaataagtggcctagaccgggtgccgtggctcatgcctctaatcccaaccctgagaggctgagacaggaggatcgcttgaggccaggagtttaagaccagcctgggcaacatagtgagaccccgtctccacaaaaactacaaaaattagctgggcgtggtggcacacctgtagtcccagctactcaggaggctgaggagggaggaccacttgagcccgggaaacagatgaggcctggtctaaagaaaaaagaagcgcccttgagaagcacagatcagtgaagggaggggtctcggtgaggggacggggctaagaagtggacctcagtggagaggtgtggtgggctccttgaaaaaaaacaaaaacaaaaacaaaaacaccctgccatgtgggggcggggcctcagtgcggcccgcccacctccccccttccctgcgcgcggcactgcccttaccttctgcgggtgcgtcccgggcaggggaaccgggcactggccgcggggctgggctgggcgcgcgaccgaggccgaggccccggcgcagagccgagcgcaggccacccagctgggcctccgccgcgcgccgctgcacctccacgcgggccagctcggcctccaggccttgtgcccggccctcggctgcgctcagccgcaggcccagctctgcagcctcggcccgcgccgcctccagcttcagctccaggccgcgggcgtggtccagctgctgcttttcagtgccacgcgcctcctccagggagcccagcaggcgtcgctcgcgggtccggaactcgccttcttgttcctgcagcttccgctgggctacctggagctggagtgatgccaggaggtggaggtcggcaagacctctcccaacccgacgccccacccctaaggcccagactggagcccaccatccctgactgtgtggtcagtacaaccctttctcctttagtgctcgccactcaagcaggcggtgcaaaaacatccccgtgggaggaaatactagaacttgtttattaatctctttattctttatacaagccttgtaatgcccatagtttattagtaataacagctggcatttgaatacatagggcttatcagtgccaggcactaagtaactttccaaaaaatattaactctaattactactctatgaatcgatctcactttacagaagatgaaacaggcacagagatgctaagtaacttgtccaaggccagagttagtaaactgcagagctgggattcaaagccaggcactctagctccaaaggctgttttttttgttgtttttgtgggtttttgtttgtttgtttttggagacagagtctagctctgtcacccaggctggagtgcagtggggcaatctcagctcactgtaacctctgcctcctgggttcaagtgatcctcccacctcagcctccgagtagctgggattacaggtgagcaccaccatgcccagctaatttttgtatttttagtagagacagagttttgccatgttagccagactgctctcgaactcctggcctcaagtgatctgccagcctcggcctcccaaagtgctgggattacaggtgtgagccactgcgcccggctgtttttgtttctgtttttttttttgttttttgtttttaatagcttgacagcagcttattaatcacatgtactcacagccctggggggtgggggaaaggcggggaggcataccacacggggccacacgggggctgtgggctgcacttgagaacacagtgaacagccaggaaggttaagtgcccactggttccaaagggagctgtgtccagaggctgttcccttaaccactaggctacattgccgcccttgcccataatttatcaataaatttgcacacaatgggggcatgcactaaaatatcatttcctgatgggatgcatggtcacacagacacaaagccacccctgccatttagagagtcaacctctcacggtcaccagtttcactggaaacccatctactgagcagctggttgccaggacctgtgccagggcccttcatacatgctcggctgtgctagcccatctctcatgagcgctctgaggcacagagatgacgtgacttggttcaggccacacaacagattcatggcaatgaaacagccggaaaaggcagagcgggtagcctgtgggctttggagtcagacagacttaggtggctgtgtgaccttgggtagatccctcgacctctctgagggctctgtaaaatggggctaatggtaggaagggtgtggtggctcacacctgtaatcccagcactttgggaggccgaggcaggtggatcacctgaggtcaggcgtttgagacaagcctgaccaacatggtgaaatcctgtctctactaaaaatacaaaaaattagctgggcgtggtggcaagcacctgtaatcccagatactcgggaggctgaggcagaagaattgcttgaacccaggaggcggaggttgcagtgagccgagatggtgccagcgcactccagcctgggcgacagagtgagactccatttcaaaataaataactaaataaaaagggctaacagtacctaccccatagggctgctggggaaatcaaacaaggttgtatctacagggcctctccctacccattttgtgccggcacacagtaggcccactgttctttgggttgttgttactacaactggggaagagtctcaaggagtgggggaaggagcaagccctagggagtggcctttcagaatggccccagcattggggtgcccacctgcttcctgctgggggaaggaaagatgcaccagcctgcccgcctgctcagttacctcctgccgcatcacctccaggctggcctcgcccttcagcagcctctgccggaggcccagggtctcccgcctgctctccttctctgcccgctcgcccagcgccaggcggccctgcagctccgccagctcccggcccagtctggtgttctcactgtccagcatcttcatctgtgagagcacgggaatggcagcaggttcagctctgcccctgtaccctcccagttctggcccaaggccacttggtacctactgctgtagggacacatgtatcaaataccaccccacatccactgggagccggcccctacacaaccacactgaacttgggcgatgccaggcacttgggcaccagtggcctgtttaccacttaatcaatgggccaaaactacctttcataaaggggtgggtataatagaaggagggctcagcccttagcagaccaggagttcacaggcaggaaccacagctccctgggttatctttcccctctacgatggcgatgaacgtttttggagcgcttaccatgtgtccagtcctgttctaagcacttcagttatattaactcgtttaatcttggtacaatgctatatgaggtaggtagtaacattatccctatctaacagatgagaaaactgagcctcagagtgtcagagtaacctccccaaagtcacacagcccacacacaccagactgggattcgatctgagacaacggcaatgttctaagcccctatttccccacaggagcagggaggggtactgcctacctcccccatgtgctacagcaggggtaacaggagaggccgtagcatgcaacgcgtccagcaaaagctggcacgcaaatgccagctcctttccgggagtcttgtggtttctcaggaaggggcctgggtgaagggggctgtggtatctctggctatcagagtatcagaatatctctggctatccagttgtgatctctttttttgtaattaaaaacaatttttttaattaaaaaaatttgggggggccaggcatcgtggctcatgcctgtaatcccagcactttgggaggccaaggtgggtggatcacctgacatcaggagttcgagaccagcctggcccacatggtgaaaccctgtctctactaaaaatacaaaaaaattagccaggtgtggtggcgggcatctgtaatcccagctacttgggaggctgagtcaggagaattacttgaacccgggaggcggaggttgcagtgagccgagattgcgccactgcactccagcctgggcaacaagagtgaaactccatctcagaaagtaaataaataaataaaataaaaattaaaagtttaaaaactttttttagagtcagggtcttgctttgtcgcccaggctggagtgcggtgatgcgatcacagctcactgcagccttgacttcctgggctcaagggatactcccacctcagcctcccaagtagctgggactccaggagcgtgtcaccacacctagctattttttaaattttttgtagagactggttctcactatgttgcctgggctggtcttgaactcctaggctcaagcagtcctcccaacttggcctcccaaagcatgagattaaaggcatgagccatcacagctggctaatttttcgtatttttagtagagacaggttttcaccatgttacccaggctggtctcgaactcctgggctcaagcaatccactggcctccgcctcccaaagtgctgagattataggtgtgagccactgcgcctggcctggttgtgatatctctgggtgaggcagcgcctaggggctgaatgaggccatttcctgttctttgcatcttctagagtgagaagcctgaacccacagtgtccaggccagtgcccagtagacagcaggtgcttcttcaatacatgctgctgttgagtttgcagatcatcgaattcacgggtcagcgaactacagctcacaggccaaattcagcccatctcccgtttctacaagggtctgagttaaggatttttttttttttttacatttttaaatcatcgaaaatggatcatttctaaaggaagaacaacatttcttgacacatgaaaatgacagaaaattcacatttcagtgtccctaaacaaagttttactggaacccacacccctctgttcatgcactgtttgggactgctttctcactaccccagcagagtcaagtagttgcaacagagactgtgtggcccgtaaagctggaaatattgaccatttgggctctttacaaaaaaccatttgccaacctctgacctagttcacaaaatctgtaccttttgttgtttgcagattcctttgagaactggacaaggacaccagctcctctccttgcagaaatgtgagcctgagtgtgcacacaaatgcacgcagacttttgcacagtttcagggattcaaggactcctcaaagcccatccattcacaccaaggttaggtgagagggcttgtcatagttcaagcccctggttttacataggggtagaaacgtaattccagaaagggggagctattggcccggggcacacagcaagccccaggctaaggggtggcacagggagagtacctgacgccggagctcctgcagctcccgccgagcctccagccgtgagcgctccacctcctgcagcccagttcgcagctccccggcctccttgcccacagctgtccgtgcctcctctaggagtgccagcttctgctccttgtcctcattggcaagcttcaggctggagagggcagaggtcaggggctgccctgggtcctgggagtagtcagtggctctacacaaaagccgtctcctccaatttctggagtggatcaggcactgcctgcccatgtggcctctctgaagagctaagccctgagccctgcagggctggggcccaggccctcggctgggaggggtagaccagtgactccaggaggggacctggtttccagggtgatgacggtgggtgggtctgagtctggacccaaagctgcccactgcccctctgcccctttccccaatcaacagggaggaaaccttcctaaaatcacccaggtgccaggctctgcttaggagacagaggatccgtatctgggcaatttccccagaacgttgggggtgaagttaggtttcagggatgggatcccatgaggactcaggactggtcctcctgcgacaccccacctgatgcgctcgctctctgccttcttcacagcagaccgaagctcctcattggaacgccgcagggcctcgcgctccttggcaccctcgcccaggctgcgtcgcagctcgcctgcctcctggcgctgcacctcccggccctcctggctctcacgcagcttgcgctgggcctccagcagctcccgccgcagcccgtcacgggcatcctccagcagacgcagctgggtccgaagctcttctgcctgtgagcacagcaggtgtccccagggcagcggtcagggacccccccgtcaagctgggtcttgtaccccagatccctggacccagggagcctgccccatccctctgcagtgctcagaccgcaggctgtgagttatcatttgagcaaggcgtgctgtaatcagtaatgttttgacctgaagtcaccatcaatcaggactgtcctgagcacaacaccaagagggcagagaccccactcacccctccttgaggccaaatcccacctgtacacaacaggtgcttcgtagtgcttgctgcctcctttctaagttgctattcattggtcctcaaatgcagggaggaatcttacactcttctggggccctggggaactaggcccccaggcacacagtgccatttagggtatgctgcttggaagaggggggcggctgctcacctcgcgaagacaggagtcccgctgcttgcccaggtctcgggcctgctcttgcagcctcctcacctcctgggcgtgggccgcagcagcctcctcccgctgggcccgtaggtcccgcagctcagacgtcagagcgttcacggtgctctgggacagaggggctcctcagacttggtcctgctgtgtcccccagccccgggctgctcccaacccgctcagtgcactgtccacttttagctctaaacacggcccctcccgctggcctgccggaccctctgccaacccctggatgcatagtgagtgctgcccgtgtagccagcctctccctcacgccaaaaggattcatcagggcagggctgagccacctccctcagatgggggctcccaaaagaagggctaaacctcctttcccacagcctggaagcttctccaggacagggccatgccgccccgtggtgggggctcctcagccagggatgtgcctctctatgagacagaggcccagctgcccagcctgccctacccggtcctgctcctgccggctctgggcatctcgtttctgccgctccatctccagggagatggtggccaggctgtgccgtgtacccatcaacttctctgacagcgccgtcttctcagactccttcagagacaaggcctgggcagaggcaggggacaaagggcttgggggatgggctggtcctgggggcatgctcaggcttcttgctgcctaggaaatgtgcccactgggggcttagaggcctgagtgtgccactgcaggtggacccagggcagacatgcagccctggaaaagggcacaacggcagtcacaagaatcccggacgtggataccactcatagagctcactaacccgccacagcaccctgactgcagagtctttctttctacccatcttacagatgaggaaactgaggctcaaggaggtaaagtgactcgcccaggtacacagctggtgaggagaggagatgggcacagtctgccctgtctccgttacattataggaaagttagggatttgttatttggggggacacgtcagctgatgcctgtgggcatcgtggggactgctcagaaggcagccatgaggatccatgcccagcgtggggtgggacgaggcatgggagaatatggaacagctttcctggtgtcacgactgtcactgtcactcagtaagtgctcactgtgtgccaggcatggagcacagcaaagcctcacgaacccccttctaatcctcccctcctgcaggtaaggaaactgaggcccccaagagggcagtggcctgccccagggctcctagctgccaagtggcagagcagggcccggccccagaactggagcagctcagagagcagcagaggccatgccagggctcacgaacctgctgcttctcactctctgctaggaggaggccctcgtcgcgctcctgctgcagggcagcaatctcctcactcagctcttccttctcagcctccagccgggccagcagctcctcctgctcacgctgcagctgactctgcagctgggcccgctcggcctccagctcccgccatgctgcctcctagggggccaggaccggatgcctgtgacacaccaggagggggcccaggcagaccccccaaaacatcagggcagcaagagccatctggcccccataccctcagagatggagggtgaccaggtaaatacaagggagtgataagggctatgacggggacacgccagggccgtgaaagtgccaaggagcagcagtgggctggcctgggggtccgaacatggtcccctgcggagggacaagtaactgtcagccaggtaaggagagaaaagaccaccccaggccaagaacacagcccctggaaaggcctagaggatgcagggtgcagaggggaacgggacatggtgagtcacagggccagagccccaggcaggggtggggccaggacaggccgtgtgggccatggggattctaaggacagtgaggggagtgggagagaggactcgagccaaggtgacaaggagcaatctgatttttagcttaggggatgttccgacagctgtggaagagggattggggttgggatggaggggagttaggactggctgtgaggaatgaagggggtcaggggttgccagaggagctggagagaacacagatttggggacattaatgaggccaagccaggcaatgcaaagggcaagaagagcaagggggaggtcacaggagttcagatccctggggactggacaggcgggcaggcagagcccacaggcaaatagcagcccacctggggagcctgagggcaggtgcctgcctcagcacttgcccctagcaactctgtgagaagcagacagagctgccacttctttttttttttttttagacggagtcttgctctgtcacccaggctggagtgcagtggcgagattttggctcactgcaacctctgcctcccaggttgaagcgattcttctgccttaccctcccaagtatctgggactacaggcgcgtgccaccacgcccagctaattttttgtgatttttagtagagatggggtttcactgtgttagccaggatggtctcgatcttccgacctggtgatctgcccacctcggcctcccaaagtgctggattacaggcatgagtcagcacgaccggccaaaccgccccttctttaagatcttcaccgtagctcatgcctgtaatcccagcactttgggaggccgaggtgggcagattacgaggtcaaaagttcgagacaccctgaccaatatggtgaaatcccgtctctactaaaaatgcaaaaattagccaggcgtggtggcgcgcctataatcccagctactcaggaagcagaggcaggagaatcgcttgaacccagaaagtggaggttgcagtgagccgagattgcgccactgcaatccagcctaagcaacagagcaagactccgtctcaaaaaaagaaaaaagaaaaaaaaaaaagagctttaccgccacctcctggagaagcgtggtaacaaccacccaaggccaggggtactgcagggtgagtggcatgccctggagccatgcagtcatagcctgcacctctgtcagaggcagccctgtctaggatttggtggctgagggcccctgtcccgagggccactctggagagcatgtcagtgccagcaatcataacttatggagcatttgctaagtaccagtcactatgctaagccctctatgcagatggtctcagctcatcttcaatacctttcactatcctatccctatttctacaggtggggaaatgaaggcacggacaccttgggtagcatcaccagtaagcgaccaagattcgattcaaacccaggcaattcaaacccagagtcagtgttctagtaacttccctggccccttgcctttctatatgctgaggtctgagtggctcttcatatgcaaacagtacttcttagcaaatgaaagtgctttcctgctgtacattaggtcagtatttcccaaatgtggttgtggaccctctgcatcaggattaccagggctggaccagatttgggacctgggaatctgcatgtctaataagaaccacaacctccccatccccccagtcctcctagctgtccccaggacctccacaacagagaggaagtcccatttcacagatgtagagaccgaggcagagcaagaacgatgatgaaacactggctcagagtcctgcccacccctccccagctgcctgaaccttttcacgctggagtcgctgtaagtcctcctcgtgagctgcccgctgctcccgcagagaggcctgggcctcccgctcagcctgcaccagcttctgggccatcagctccttgtctagactggctttctcctgtgtagctattatttgctgccgcaggcccgccaactcccctgcacgagaggaatgggggaaagggcagggttgggttgaaacttttccttgggccagcagacttaggccaggtgagccacatgggcaaaatcccagaggcagagggcctgcctggcatctagtttgggtcctcttgaagtggcttgccctctctgggcctcagtttccctatatgctacatgggcccactggccctgacccctttcctgcctacctagaatggcattaaaggcataaaatgactgatgagaaggcctcccaaatgggacggatgtcaaacatataacaaccctaggtcaggtgccttggctcacgcctgtaatcccagcactttgggaagctggggcaggtggatcaccttaggtcaggagttcaagaccaacctggccaacatggtgaaaccctgtctctactaaaaatacaacaattagccaggcgtggtggcaggcgtatgtagtcccagcctcagggaggctgaggcaggagaatcgcttgaacccaagaggcagaagttgcagtgagctgagattgcaccactgcactccagcctgggcaacaagagtgagactctgcctcaaaaaaacaaataggccgggcgcagtggctcatgcctgtaatccagcactctgggaggctgggtcaggtaggtcaccttaggtcaggagtttgagaccagcctggccaacacagcgaaaccctgtctataccaaaaatacaaaaattagccaggcatggtggcgggcatatgtagtcccagctacttgggaggctgaggcaggagaatcgcttgaatgcaggaggcagaagttgcagtgagccgagatcgcaccattgcactccagcctgggcaacaagagtgagactctgtctcaaaaaacaaacaggctgggcgtgatggctcatgcctgtaatcccagcagtttgggaggccaaagcgggtggatcacctgaggtcaagagttcgagaccagcttgaccaacatggcgaaaccccgtctctactaaaaatataaaattagccaggcatggtgatgcatgcctgtaatcccagctacttgggaggctgaggcaggagaatcgcttgaacccagaaggcagaggttgaggtgagccgagatagtgccattgcactcccgcctgggcaacaagagtgaaactctgtctcaaaacaaacaaacaaaaaacaaccctattcctgactgagcacttactatgggtcaagcgcccagctaagtattttagacataacctcattttgtcttcataacatgcctatgtagtttatcctcatccccatttaacagatgatgaaatggaggctcagagatcagcagcaacttcccacagctgcacagctacacataaagcatctcctttaatgactgacatgaacatacccgtcaaacgttaactatttatattaatggaaatgactacagggaatggaaatggtatagctaccatctaaaaaccatctcccgggttggaaacccaccagcatttcccttcctggttctgtctggctcaggtgtacatggacaggaaaattaatttccatgacccaagtaggtgcttagttaatgttaggtgagcagaaagaagccctgagttcagagactggatgggaacggtgcagggaagtggggctgggattctggggccaagagagtcatctgaaaagcacagagaactcagactaacaggcctgatgaccgatgaacggcagttactgttgactcagccaggcaccgtgccacggccttacacgcttttcccacgtcatcctggcaacaggcttagaaggtgggcattgccacctccaatcatcagctgaggaatctgcagcccagagaggaaaggggcttgctcaagggaaggtgagatctaagtggtggcacaggactggaacccaggccagccagactcctactccagtgctcccaacttctgtgagaccccagaccttgggaggctgcagtctgggctggaacctggtgttccccccaagtccccagcccctcgtaccagtcagggtctccttggccagcagcagggcctgcccctcggcttccagctgctcccggcgggcctcaagctgggccagctgccgttgcacctcaaacaggctgccctccagggcttccttctccaagctgcagcacatacagtccctgaggccctgggactcagcctccctggccccaggaaactgtggatctcagggagtggccaggcatgggccaagtgccaatctacctgcctggccaggcccacactccctggggaagcctgagccacagctaggacgagtcggcaagccagactccttagtaactgcccctgggggcccgtgcctgcgtgtggctggtcatggtgtggccccaggaggaccccccagggcgggttgggcagagcccaaggccttaccgcaggcgtgtggcctcctctgacagggtcctgccttcacgctccgcagccaccagctgcacagccaggccagcgtgctccttggctagcgcctccttctcacgggccgctcgctccagcgcctccacttgccgctgggcctcccgccgggcctgctccagctcctgctcccgcccgctcagctgccgggagagctggcccccacccagagactgagtagcactcccagcgtcccccagcttgttcatcgtgcagcaccccaactctgggcctaacccagtcctggcagaaggcctgggtttgagcccagggtctgccctgatgtgctacatgtacttgggcaagtcatgaccttctctagatctgcaatgcacgtgtgtacaaaaaccagggcccagccaggtacggtggtgcgtgcctataatcccagcactttggcaggtggatcacttgaggtcaggagttcaagaccagcctggccaacggggtgaaaccctgtctctactaaaaatacaaaaattagccgggcgtggtggtgcacgcctgtagtccctgctacttgggacgctgaggcaggcgaacagcttaaaccctggaggcggaggttgcagtgagcccagatcgtgccactgcattccagcctgggcaacagagcaagactctgtctggaaaaaaaaacaacaacaaaaacaaaacaaaatgaaacaaaaaaaatgagggccctcactcagctctgggagtaacagaacccttgtattactctaaacttgcagagaagctgaatatataaaccagacccaagtgcagctgctcggcaggcctcaaggtggagacctgcaccctgcttcctgcaccccctaccccatcctctagaggcccctcccagaaacctaggcgctccaggatagaccttgcatgaaggtccctggatccctgaaacattaaggtctcttccagatgtgatgttcccaaaagtctaagattccaattctaaaaagtctccacctattattaatctgtatcattattattattattattattattattattattgagacggagtcttgctctgttgcccaggctggagtgcagtggcatgatcttggctcactgcaacctctgcctcctgggttcaagcgattctcctgcctcagcctcccaagtagctgggactacaggcgcgtgccaccacgcccagctaattttttgtagagatagggtttcaccgtgttagccaggatggtcttgatctccggacctcaggtgatccacccgcctcggcctcccaaagtgctgggattataggcgtgagccactgcgcctggctggccccatgttatagatggggcaactgaggtatgggagattgggcagcttgtccaaggtccccagctagcagaagtggggctggatttaacccagaagcaggctccagtgcctgtgacttaacccaggactggatgcagggggctgggagcccggcctgccccacatgctctccacaccacccccacacacagctttgcccacctgcgctagctgctcctgcagctggctgcgctcatggcgcagcgtggggagctgctgctccaatgcctcctgggcctgctccgccactcgtagggagccctccaggccctgccgcgccacctcctgctccaaccgcagctcctctagccgttcctgctcttcccgcgccactgtggcctcctgctctgcctgccgttgccggccctgcagggcggacttttcttcctccagctggaggccaggtaggagtggggcctcgtgagcagggcgtccctcccaggaccaggacgcctcctccacccacccaccagcaacaatagcccaggggaggctcccagggaatgagggacagtgcccttgggtgtatgggacactggggagggggagatgaggagggcccatggaacttctgtgctttgacgcctagaggggatagacagacagacagagaaccagagacagacagagaaccagggacagaaagggaggcaggggccaagacaggtacagggctgggcccggggtgcctcactgagtggggaggatgggtgggcaaggcaggtgggcccgcaggtgcacagcgtacctgggcgacaaggcggttcagatccaacttgtcctgagcaaggctctcgttgagggcgctcagcttggacagggagtcctgcagggaggcctcctctgccctcagcttggtcatggagagctcgagctccacgcggccagcctcagcctgcagggtcaggccccgagaaatgaggaaaggcagaaaggtcgggaggaggtgaggaggcccaagaagagacccagagagatggaccctcagagacagggtaggggagacaaggaggggacacagtgtgagatggaaaaaaaaaaatcaccgcagaaagcctgctgcttatgagccatttaaaagccacacaccacagagctgtgcaaaaatagctcaagctgcagggcagggccagagttcagaggatcccctgagtagggtctagggatagcactgctcagagcccaggctgcagcggacagcgcaggcccccctgccaaggaccctctgcgctgtggccacaactctcagaccccaggagctgagtctcaggcactggatgaccctgagctataggcattgcccccaggagcatccagaagagcagggatacggccataaagagaggtcagtccacttatggctgggaccagaggtccagaggtctgtggcctgtgacaaagatcagcctgtatccagaaggaaggggtcagtctgtgaccaggctcagaggtctgcctgacactgggaccagtctgtgccagagtgacaaggcttggggctgggggtcagaggtaggtttgtggttgtgcagcagacagggacccaccttggtcagcgcctcggccacctcggccttctcggcctgcagcatgtcccgttgcagtgtggcgcggctcagcgcctccctcacctccaccagctccttggccaggactgagcgcttcccttccagctgctctagttgtctatggctgtgggacaaagggtgggtgggtggcccatgtcactttcctgccccgaacctcctgtagccagcgagatgctgggctggggaccaggcctgaggcaggagtttggagagaaacagcctgagccacagggcaaccaagcccactaccgcttagctccatgaccctgggcctccgttttcacatctgcaaaatgaggtaacacttacctcgtgacattgtttgtttttttgagacacagtcttgctctgtcacacaggctggagtacagtggtgcgatcctggctgactgcaacctctgcctcccaggttcaagcaattctcctgcctcagcctcccgagtagctgggattacaggtgctcaccaccacgcctgactaatttttgtagttttagtagagacgggatttctccacgttggtcaggctggtctggaactcctgacctcaggcgatctgcctgccttggcctctcaaagtgctgggattacaggcgtgagccactgcgcccggcctgttttaaggatacaaacttcacatgtgcttaaaatagtgcctgacacatctccccaaggaccttcagaaacaagaataacatgctccaccacagtctactaaacatcatcatcgatcacgtccctgagaggtaagcagcgcagtggtgaagaggttaactctgaaggcagaatgtctgggttcaaatcctggctcttctgctaactgtgtgacctggggcaagtgacatggcttctctgtgcctcagtttaccatccacaaaatggagataaccgcttctatgtcacagagttatcatggagttaaatgagagaactgaattgcttaaaatggtatctggcacttagtgaaattagtaaggatattattattcttctaactaaatttttaaaatactactgctaatattactactgttattttaattattcttgttattatcatccaagttctaccttttaactagttctctgactccaggtaagtgactatacctccctgagccccagtttcctgaaatgggtctggttagaaaacccgacatcggaggggtccagacggtaggaggcccaggacccagtgggtgtcacctaaccccaggggggcactgtcaggggacccgaggcacatctgaagggtcctggcagggtggcgagatgctgctcacctgcgctcaagctcccggcgcacccgcgcgccatcctgcactgcgtcctcctgctcttcctccagccggtcccgctggcgccgcagctcctcctgggcagcctgcagcttctcccgctcctgccgcagctcctcggcctgctgctgggccacctgcaggctgtgggccaggttgctcttctcccttcaggacaaggggagggggagcagaggggatgctggggctgctctctgcagggaaggtggctggctgctcctctagccatgagctacatcctccagtcttccaaggcacctgcctccaggaagccttccctgaccaccctgtccatggctgactcatttcactcacacactccagcagaagaacctggctttccttctctccagtccgcccacttggagtggatggaggtgctggtgtgatctccaagcaccctaccaggtagaagaggccgagctaggctcctgggacacacggcaattgtgccaccagctctgctaggccatgtgaccaggaaatgtcccctataacaccccatgcccctcaattctgggaagcctgatagagctgagtctgcagatcccacagcttcctgctacacaggcacatggtggccacggcaggggagggaggagaagggaacaactgggaccccaaagacttgccatgagctgccacgttccccactggccataggtgcgaaaaaacttcacagcgtgattttgttttattttttttttttgagacggagtctcgctctgtcccccaggctggagtgcagtagcgcaatctccactcactgcaagctccgcctcccgggttcacgccattctcctgcctcagcctcccaagtagctgggaatacaggcgcccgccaccatgtccgggtaatttgttgtatttttagtagagatgggggtttcactgtgttagccaggatggtctcaatcttctgacctcatgacctgcccgcctcggcctcccaaagtgctgggattacaggcatgagccaatgcgcccagtaatttttttttttttttagacggcatctcactctgtcgcccaggctggagtgcagtgcacgatctcggcttgctgcaacctccacctccagagttcaagcgattctcctgcctcagcctcccaagtagctgggattacagccatgtgccaccacggatggctaattttgtatttttagtagagacagggtttctccatgttggtcaggctggtctcgaactcccgacctcaggtggtcctcctgcctcggcctcccaaagtgctgggattacaggagtgagccactgtgcccggccaatttttttttatttttagtagagatggggtttcgccatgttggccaggctggtctcaaactcctgacctcaagtgatccacccgccttggcctcccaaaatactgggattacaggtgtgagccacctcgctcagtcgacaatgtgctgttaagtaaaaatagcagaatgcaaaatgggatgtttgctgtgaacacaactgcttaaaaagaccttctcctttccaggcatggaaagcttgggtttactctcacatggacctgaattccagttcccaccctgccacccccagccacacacgctgtatgagtctgagccagtctctcaagcttacaacaacagagttccgaattgcatgagtttgacaggaagactaaatcacagagtacatacaaaacactcggccaagagcctggcacacagtaggtgtgcaggaaacgtttgctatctcactgccaggcaacacaatgggaaggaaaaccagtgccctaaatgaattaggatgggcagatgaggctgtgagaaggcgctgtctttttattcctatttttcaaacttttcattagatggttacatttatgaagagaaaaaccaaacaacaaaatatcaaaaacaacctggcagctaagaagtggataatttcttgtcttaaaaatcttcagggtgcctggcgtgatggctcacacctataatcccagtactttgggaggccgagacgggctcaggagttagagatcagcctgggcaacatggcgaaaccctatctctacaaaaaacagaaaaattaggcaggcgtggtggtgtgtgcctgtagttccagctactcaggaggctgagatggaaggatcacttaagcctaggaggtggaggttgcagtgaaatgagatcgcaccactgcactccagactgggtgacataacaagaccctgtctcaaattaagagaaaaaaaaaatcttcaaggctaggcatggtggcttatgcctctaatcccagcatttttggaggccgaggcaggggaatcacttgaggccaggagtttgagaccatcctgggcaacacagcaagaccccatctctaaaaaaaactccaagaaatacagtccaaaatagtgctggcaatagaactcgctgagatgacagaaatgttctatggccatgtatggttgatgagtgcttgaaatgtggctagggcaactaaagaactgaattttttcttttttttttttttttgagacggagtcttgctctgtcgctcaggctggagtgcagtggcgccatctcggctcgctgccagctccgcctcccgggttcaggccattctcctgcctcagtcttccaagtagctgggactataggtgcctgccaccacgcccagctaatttactttttgtatttttagtagagacggggtttcactgtgttagccaggatggtctcaatctcctgacctcatgatccgcccgccttggccttccaaagtgctgagattacaggtgtgagccaccgggcccagcattattattattattttttttttgagatggagtctcgctctatctcccagcctggagtgcagtggcacgatcctggctcattgcaacctctgcctccggggttcaagtgattctcccacctcagcctcctgaatagctgggattacaggagcatgccaccatgcctggttaatttttgtatttttagtagaaacagggtttcaccatgttggccagcaagctgggtgtgagccaccacacccagcctgaattttcactttttaaaaattttaattaaattttaatagagccaggcacagtggcttatgcctgtaatcccagcaatttgggaggctgaggtgggaggagtgattgaagctaggagttcaagaccagcatgggcaacatagtgagacccccatctctacaaaaaatttagaaatgttggcggcttgtctactatcctcgaggctgagatc

SEQ ID NO: 9 - DNA, 1973 bp, homo sapien
gatagcagtgtaggtggttagcggcacctcggataaggtcctcctaggtcaaagggatgctaatgactagccggtgctctaggaagacattgagaccagccaacttcttgccttgataactactgaagagacattgggtggctggattttgaaagcagacttctggttataggtgatgcaacttgaaaaacaatcctgaaacatgaaacaagaataataatatttaaatgtaacttaatcattatacctctttatccatcaaagtggaattcattccattccctttcatctgtgctcatactttgcatcagatattgggtaaaccaaagtgtgtaggaagaaataaatgttttcatagtcattacactttacaatgggagtgctaaaattcaagcacatctttttcagaagctttgttaaatcaagtggagtatcccagatagttttcaccttccttctgattccatgttgcttgactctgaatttcagagcacctcctgttattccaaatgtggctttcctctgggcctggaatgccccaagtgaattttgtcttggaaaatttgatgagccactagatatgagcctcttctctttcataggaagcccccgaataaacgccaccgggcaaggagttacaatattttatgttgatagacttggctactatccttacatagattcaatcacaggagtaactgtgaatggaggaatcccccagaagatttccttacaagaccatctggacaaagctaagaaagacattacattttatatgccagtagacaatttgggaatggctgttattgactgggaagaatggagacccacttgggcaagaaactggaaacctaaagatgtttacaagaataggtctattgaattggttcagcaacaaaatgtacaacttagtctcacagaggccactgagaaagcaaaacaagaatttgaaaaggcagggaaggatttcctggtagagactataaaattgggaaaattacttcggccaaatcacttgtggggttattatctttttccggattgttacaaccatcactataagaaacccggttacaatggaagttgcttcaatgtagaaataaaaagaaatgatgatctcagctggttgtggaatgaaagcactgctctttacccatccatttatttgaacactcagcagtctcctgtagctgctacactctatgtgcgcaatcgagttcgggaagccatcagagtttccaaaatacctgatgcaaaaagtccacttccggtttttgcatatacccgcatagtttttactgatcaagttttgaaattcctttctcaagatgaacttgtgtatacatttggcgaaactgttgctctgggtgcttctggaattgtaatatggggaaccctcagtataatgcgaagtatgaaatcttgcttgctcctagacaattacatggagactatactgaatccttacataatcaacgtcacactagcagccaaaatgtgtagccaagtgctttgccaggagcaaggagtgtgtataaggaaaaactggaattcaagtgactatcttcacctcaacccagataattttgctattcaacttgagaaaggtggaaagttcacagtacgtggaaaaccgacacttgaagacctggagcaattttctgaaaaattttattgcagctgttatagcaccttgagttgtaaggagaaagctgatgtaaaagacactgatgctgttgatgtgtgtattgctgatggtgtctgtatagatgcttttctaaaacctcccatggagacagaagaacctcaaattttctacaatgcttcaccctccacactatctgccacaatgttcattgttagtatttggtttcttatcatttcttctgtagcgagtttgtaattgcgcaggttagctgaaatgaacaatatgtccatcttaaagtgtgctttttcgactaattaaatctttg

SEQ ID NO: 10 - DNA, 4215 bp, homo sapien
gccgccgggcgccaggcctgagcggtgggagggctctgcggggcctggtgttcaggcgtcccaccacgagggtggagcagcgttggatacttgttccttagggaccgaagctccggtggcacccgggctatttctcagaggacaattagtaacgtgtcgccatgaggagccggagtaactccggggtccggctggacggctacgctcgactggtgcaacagaccatcctgtgccatcagaatccagtgactggcttgcttccagccagctatgatcagaaagatgcttgggtccgagataatgtgtacagcatcttggctgtgtggggtttgggcctggcctatcggaagaatgcagaccgggatgaggataaggcaaaggcctatgaattggagcagagtgtagtgaagctgatgagaggactactgcactgcatgatcagacaggtggataaagtagaatccttcaaatatagtcagagtactaaggatagcctccatgcaaagtacaacaccaaaacctgtgccactgtagtgggtgatgatcaatggggacacctgcagttggatgctacctctgtgtacctgctcttcttagcccaaatgactgcctcaggactccatatcatccacagcctagatgaagtcaatttcatacagaaccttgtgttttacattgaagctgcatataaaactgctgacttcgggatatgggaacgtggagacaagaccaaccaagggatctcagagttgaatgccagttcagttggaatggcaaaggcagccctggaagcattagatgaactggatctgtttggtgtgaaaggtgggcctcaatcagttatccatgtcctggctgatgaagtacagcactgccagtctatcctaaattcactactgccccgtgcttcaacatcaaaagaggttgatgctagtctactctcagtggtttccttccctgcctttgcagtagaggatagccagttggtggagctcacaaaacaggaaatcatcaccaagcttcagggtcgttatggttgctgtcgctttctacgagatggatataaaactcctaaagaggatcccaatcgtctgtactatgaaccagctgagctgaagctatttgaaaacattgagtgtgaatggccattgttctggacatactttattcttgatggggtcttcagtggcaatgcagaacaggttcaagaatataaagaggctcttgaagcagtcctcatcaagggcaaaaatggagtcccacttctgccagagctgtacagtgttcctcctgacagggtcgatgaagaatatcagaatcctcacactgtggaccgagtccccatggggaaattgcctcacatgtggggtcagtctctatacattttaggaagcttgatggcagagggatttttagcccctggagaaattgatcccctgaatcgcaggttttctactgtaccgaagcccgatgttgtggttcaagtctccattctagctgaaacagaagaaatcaagaccattttgaaggacaagggaatttacgtggagaccattgctgaggtataccccatcagagtacaaccagctcgtattctcagccacatttattccagcctaggatgcaacaatagaatgaaactcagtggacgaccctacagacacatgggagtgcttggaacttcaaaactctatgacattcggaaaactatctttactttcactccacagtttatagaccagcaacagttctacctggctctggacaacaagatgatagtggaaatgcttagaacagacctctcctacctctgtagccgctggcggatgacaggccagcccaccatcaccttccccatctcatacagcatgcttgatgaagatggaacaagcttgaattcaagtatcctggcagcactccgaaaaatgcaagatgggtattttggtggggcaagggttcaaacaggtaaattgtcagagtttttgacaacatcttgttgcacacacttgagcttcatggaccctggacctgagggtaagctgtacagtgaagattatgatgacaactatgattacctggaatctggcaactggatgaatgattatgattcaaccagtcatgctcgctgtggtgatgaagttgctcgttatttagatcaccttttggcgcacactgctccccatcctaaactagcccctacctcacagaagggagggctagatcggttccaagctgctgtgcaaacaacctgcgacttaatgtccttggtgaccaaggccaaggaactgcatgtacagaatgttcacatgtatcttcctacgaagttatttcaggcttcccggccttcattcaacttacttgattcacctcatccccgacaggagaaccaggttccctctgttcgtgtagaaatacatcttcctagagaccagtctggggaggtggactttaaagcactggttttacagttgaaggagacctcaagcttacaggaacaagctgatatcctctatatgctgtatactatgaaaggacctgactggaacactgaattgtataatgaacggagtgctacagtgagagagcttcttaccgagctgtatggcaaagtgggagaaattcgtcactggggcctgatccgatacatttctgggatcttaaggaagaaagtggaagcacttgatgaggcctgcacagaccttctctcccaccagaaacatttgacagtaggacttcctccagaacctcgagaaaagactatctctgcacctctgccctatgaggcgctcactcagctgatagatgaagccagtgaaggggatatgagcatttcaatccttacacaggaaataatggtatatctagccatgtatatgcgaacccagcctggcctctttgctgaaatgtttcgacttcgaattggtctgatcatacaagttatggcaacagaactggcccactcccttcgatgctcagctgaggaagccacagagggcctgatgaatctcagtccttcggccatgaagaatctcctgcatcacattctcagcggcaaggagtttggagtggaacgaagcgttcgtcccactgattcaaatgtcagtcctgctatttctatccacgagattggtgctgttggagcaaccaaaacagaacgaactgggatcatgcagttaaaaagtgagataaagcaggtggaatttcgtagactgtcaatctcagctgagagtcagtcacctggaacctctatgactccaagtagtgggtcctttcctagtgcatatgatcagcagtcatctaaagatagtcgtcaaggtcaatggcaacgccgaagaaggctggatggggcactgaatagagttccagttggattttatcagaaagtatggaaagttttgcagaagtgtcacggactttctgttgaagggtttgtccttccttcctctaccactagagagatgactccaggtgagattaaattctctgttcatgtggagtctgtcctgaatcgtgtacctcagccagagtaccgtcagctgctggttgaagccatccttgtcctcaccatgctggcagatattgaaattcatagcatcggaagcatcattgctgtggaaaaaatagtgcatattgccaatgacttgttccttcaagaacagaaaacccttggcgcagatgataccatgttggcaaaggatcccgcatctggcatctgtactcttctgtatgacagtgcacccagtggcaggtttggcaccatgacctacctctccaaggcagccgccacctacgtgcaggagttcctgccccacagcatctgtgccatgcaatgagggctttggttcctggcttctgggagccttttgacagctggtccctgcctcggttgattgtgcatggaactaaaatgttattgcctaatcactccaaccctgcccctttctgtcccatccttcccaagaagagagaactttttcgataaactaactactgtagaagaagtgaacacttacctggaggctcaccttgcagaaccagtgacaatcttatgagtataatgaacactcagccaggcctgtcatgattggctttatttctttcatcattcataaaagtttgcatgtgtttttattctctagatctgttaccaatatagttttctaactcctgtttggggagcaagtgttaataataacttattcctaaaaaaaaaaa

SEQ ID NO: 11 - DNA, 1857 bp, homo sapien
ccggacctcggctttcaaagcggcctgggtgggaagagctgtttatataaacagagattccgctgtaaatgcgctaatatcccggctgccagcgcatggcgagcgcctcccacgcccatccgtaggagcggcgtcccggccgcccctccgttcccagcctgccctgcccccgcctccttcccctcctcggccatggccacctctggacgcctgagcttcaccgtgcgcagccttctagatttacccgagcaggacgcgcaacacctgccgaggcgggagccagaaccacgcgccccccagcccgacccctgcgccgcctggctggattcggagcgcggccactacccttcctcggacgagagcagcctggagaccagcccgccagactcgtcgcagcggccgtccgctaggcccgcgtctccgggctcggacgccgagaaaaggaagaagcggcgggtgctattctccaaggcgcagacgctggagttggagcggcgcttccggcagcagcggtacctgtctgcgcccgagcgcgagcagctggcgagcctgcttcgcctcacgcccacgcaggtcaagatctggttccagaatcatcgctacaagctgaagcgcgctcgcgctccaggggcggcggagtcgcctgacctggcagcatccgccgagctgcacgccgcgcccggcctgctgcgtcgcgtggtggtgccggtgcttgttcgcgacgggcagccgtgcggcggcggcggcggtggcgaggtgggaaccgccgcggcccaggagaagtgcggcgcccctccagccgccgcctgccctctgccgggctaccctgccttcggtcccggctcggcgcttggcctcttccccgcctaccagcacttagcatcccccgccctggtctcctggaactggtgaggccgcagggcggcacctggggctaccctcgactttggagcgcgctctgcgattggagcagggccggagccgaacgcctggaacgctctccgtccgcctccctgcagccccatctccttgggcgccagggtccctggcgcgccctcatcagccgtcgcgcaagcacacacgagggacgtgtgccagagccccctccctcaccttccctccaccgccagccccagagttagattttatgcttgggccttatttgtatatttttaaatagcgatttgtataggaagcaagttatttttttaaaaaatagagtatttttcctcgtagttcgagaataaaatgtgtggggttgggtcccctgcgcgcctgcggggaacgtaggcgggagtcgtgccccccagaccggtgttcgcatcgctggctcgccccttgactggctaagtggggcccggccccagctggatcgaagggcgggttgcagtcccgacacggctttaggaagatacctgggggatggaggggtggtgatgtcagggttgggcgcgggaagaaaaggagaggaggaagctgaggcaactttgggattcttgtcagcgggaggcgtcactggccccagagtgactccgactctccgctgggctcccagagctgctggcgtttcgaataccgaaaagtcaaccctgtggaccacgacagggcagaaggagtttctccggagatgagccggcgaggccaggtgcggggcgcgctgcaccggagcagcccaggccgggccgcaagctgtttccagagtgcaggagccaagtgctcggggaccctttgaaaagtgcctggggacctgaagagcaccggggaatttgtaacccctatttaagcctgcaagtgcctaagttaaaaaaaaaaaaaaaaaaaaaaaaaaaaaaaaaaaaaaaaaaaaaaaaaaaaaaa

SEQ ID NO: 12 - DNA, 1985 bp, homo sapien
gaccagcagcctgaactggctggggcatccggaaggcttagatcttgtggccaagagttcagaccgtggcgaagtggagagtgacatgcagttggatggcggtgactgcgtggtatggaagaaaattcagctgaaatttgctagaaaatgagttgttttggaaagagactgtagagaaaggcaaatggaagaagaaagcttctgtgcccccacagataccgactgaaaagtgttagcatgagcaaaagttcctatctaatattatatgctttcctttgctcccaaagtgctgggattacaggcgtgagccaccatgctcagccaaagctgttatttttttaagtatgtattcctagatgttttatacttttatagttattgtgaatggaatgatttttttcctagataacttttaatgaatagaaacagttcctgctttatctccaaattctagaacagtcactggcacacaagtgctcagtgtttaagtgacattgttttcctgcacccaaaagtagaatgctgctcctcattggaagcatgttactttagcaaagtgccactaaaatgaccatagtccatgtgctctgatcacttgtcacagatggtgataaaattcattcacagcttcctttctaggcctgcagcatttgggagacaaaactctgctaaacctttggaagaaaaaagagaccagaggccattggtcccgaaaagtggatggaagatagggaggtagaaggaatgttacaggctgagagggcagctcacactcagctccagccacttcacctcgtgcacacactggctgagggttgccagatgtttgagaaaagctaggaatccagaccattgttaaccattggcaactatagggaacatacagaaagcatctgaactggatgtggtagagctcccagatcatgatctgattgagaatgtccatgaacttctgtcctgattgctcagtgcagactgctgcttcttctggcaagactcctctcttcgcattgacctggagttgtcacaaaatctgtttttctcttgctactcccctgagcatggcaccttctgccagagcgctcccttaactgtgtgggcaggctctgcttcacagctccccgcccactctgcccaagcagaagtgagcccctcctgggcagaaagtgcccgcaatgagggctgaaatgtttctattccctgagtaaccaacctttctctgtttccttgtccaggaaacggaggtggagctgtacaacgaatttcctgaacctatcaaactggacaagaatgaccgggccaaggcctcggcagaaagctgcagttgctgagggggcagtgagagttgagcacagagtccttcacaaaccaagaacacacgtaggccttcaacacaattcccctctcctcttccaaacaaaacatacattgatctctcacatccagctgccaaaagaaaaccccatcaaacacagttacaccccacatatctctcacacacacacacacacacagatctgacgtaatcaaactccagcccttgcccgtgatggctccttggggtctgcctgcccacccacatgagcccgcgagtatggcagcaggacaagccagcggtggaagtcattctgatatggagttggcattggaagcttattctttttgttcactggagagagagagaactgtttacagttaatctgtgtctaattatctgattttttttattggtcttgtggtctttttaccccccctttcccctccctccttgaaggctaccccttgggaaggctggtgccccatgccccattacaggctcacacccagtctgatcaggctgagttttgtatgtatctatctgttaatgcttgttacttttaactaatcagatctttttacagtatccatttattatgtaatgcttcttagaaaagaatcttatagtacatgttaatatatgcaaccaattaaaatgtataaattag

SEQ ID NO: 13 - DNA, 1026 bp, homo sapien
aagccacggctggattggagacaagatgggatcctcagaggaccaggcctatcgcctccttaatgactacgccaacggcttcatggtgtcccaggttctcttcgccgcctgcgagctgggcgtgtttgaccttctcgccgaggccccagggcccctggacgtggcggcagtggctgcaggtgtgagggccagcgcccatgggacagagctcctgctggacatctgtgtgtccctgaagctgctgaaagtggagacgaggggaggaaaagctttctatcgaaacacagagctgtccagcgactacctgaccacggtcagcccgacgtcacaatgcagcatgctgaagtacatgggcaggaccagctaccggtgctggggccacctggcagacgccgtgagagaaggaaggaaccagtacctggagacgtttggcgttcccgctgaagagctttttacggccatctacaggtccgagggcgagcggctacagttcatgcaagctctgcaggaggtctggagcgtcaacgggagaagcgtgctgaccgcctttgacctgtcagtgttcccacttatgtgtgaccttggtggggatttcttcaaagaccctcttccggaagctgatctgtacatcctggccagggtcctccatgactgggcagatggaaagtgctcacacctgctggagaggatctaccacacttgcaagccaggtggtggcattctggtaattgaaagcctcctggatgaagacaggcgaggtcctctgctcacgcagctctactctctgaacatgcttgtgcagacggaagggcaggagaggacccccacccactaccacatgctcctctcttctgctggcttcagagacttccagtttaagaaaacaggagccatttatgatgccattttagccaggaaataactgtttcttgtgacctggaactaacgtcaaagcacacaagacataataataaagacatgtacttccaaaaaaaaaaaaaaaaaaaaaaaaaaaaaaaaaaaaaa

SEQ ID NO: 14 - DNA, 1400 bp, homo sapien
cggcaaaaaaaaaaggcgtaagaattttgaagctatgttcaaaggtatccttcagagtggattggataacttcgtgataaaccacatgctaaagaacaacgtggctggacaaacatctatccagaccctagtacctaatacggatcaaaagtcgaccagtgtaaaaaaagacaaccacaaaaaaaaaacagttaagatgttggaatacctgggcaaagatgttcttcatggtgtttttaattatttggcaaaacacgatgttctgacattgaaggaagaggaaaagaaaaaatattatgatgccaaaattgaagacaaggccctgatcttggtagactctttgcgaaagaatcgcgtggctcatcaaatgtttacccaaacacttctcaatatggaccaaaagatcaccagtgtaaaacctcttctgcaaatcgaggctggaccacctgagtcagcagaatctacaaatatactcaaactttgtcctcgtgaagaattcctgagactgtgtaaaaaaaatcatgatgagatctatccaataaaaaagagagaggaccgcagacgcctggctctcatcatatgcaatacaaagtttgatcacctgcctgcaaggaatggggctcactatgacatcgtggggatgaaaaggctgcttcaaggcctgggctacactgtggttgacgaaaagaatctcacagccagggatatggagtcagtgctgagggcatttgctgccagaccagagcacaagtcctctgacagcacgttcttggtactcatgtctcatggcatcctagagggaatctgcggaactgcgcataaaaagaaaaaaccggatgtgctgctttatgacaccatcttccagatattcaacaaccgcaactgcctcagtctaaaggacaaacccaaggtcatcattgtccaggcctgcagaggtgaaaaacatggggaactctgggtcagagactctccagcatccttggcagtcatctcttcacagtcatctgagaacctggaggcagattctgtttgcaagatccacgaggagaaggacttcattgctttctgttcttcaacaccacataacgtgtcctggagagaccgcacaaggggctccatcttcattacggaactcatcacatgcttccagaaatattcttgctgctgccacctaatggaaatatttcggaaggtacagaaatcatttgaagttccacaggctaaagcccagatgcccaccatagaacgagcaaccttgacaagagatttctacctctttcctggcaattgaaaatgaaaccacaggcagcccagccctcctctgtcaacatcaaagagcacatttaccagtatagcttgcatagtcaatatttggtatttcaataaaagtaaagactgta

SEQ ID NO: 15 - DNA, 3241 bp, homo sapien
ggcttccccgccccgccccgtccccgggcgtctccattttggtctcaggtgtggactcggcaagaaccagcgcaagagggaagcggagttatagctaccccggccgcggagccggctcactgcactacccccgcccccttctttcctccagacgccgaagtcgcgggcgctcatggcgggcctggaggtactgttcgcatcggcagcgccggccatcacctgcaggcaggacgcgctcgtctgcttcttgcattgggaagtggtgacacacggttactgcggcttgggtgtcggtgaccagccgggtcccaatgataagaagtcagaactgctgccagctgggtggaacaacaataaagacctgtatgtcctccggtatgagtataaggatgggtccagaaagctccttgtgaaagccatcaccgtggagagcagcatgatcctcaatgtgctggaatatggctcacagcaagtggcagacttgaccctgaacttggatgattatatcgatgcagaacacctgggtgacttccacaggacctacaagaacagtgaggagcttcggtctcgtattgtgtctggaatcatcacacctatccatgagcagtgggaaaaggctaatgtaagcagtccccaccgggagttcccccctgctaccgccagagaggtggacccactccggattcctccacaccacccacacaccagtcggcagcctccctggtgtgatcccctgggcccgtttgttgtcgggggagaagacttagacccttttgggcctcggagaggtggcatgattgtggatcccctgagatctggcttcccaagagcacttattgacccttcctcaggcctcccgaaccgacttcctccaggcgctgtgcccccaggagctcgctttgacccctttggacccattgggaccagcccacccggacctaacccagaccatctccccccgccgggctacgatgacatgtacctgtgaaggcctcaagaatgtaacatcccaggcttccctccattctcctggagctgccaccgctgtccccatcagcaaccatgttcttgcaggctgggggcaagggattctgctcatgtgtttgcagaccggctgggatagcctccccaccccttatcagagccaagacacctgctgcagctctccacctagctgcagatagctcccaaagagaaatcagtgtgtctctttcaccatcagctcctcccctttcaccaccagctcctctccacttcccaagggagactccggcaaccttcagcaacatatatcctcgaccagatgcagtgctataagaacagaacgcattttggatgttattattaagaaccaaatgtcaatacagaattcatgttgccggtttcccacttttctttttacattaatgcatagctgcttccatttatgagactttagagtttgagtttctgtagggctgaatgactctttttcctgcccagggcccattcttgcttctcaggcaccttccgtttattaattgccattgctcctgacatcactaagatgggtccccttctggctgcatgaatggaaatgagtgactggaaatcccataggccacaagaatgactttcacaagggcaggaacattgtggaaagactgcatcattctgatgaggcaaaatcctccagctattcctgtctgggccagttttgtaggtccatctgtgcatgggcagcagtagtcaaaaagccaaggaaaaaacagagcagacctgaaggctaatcttatttttgccactaacttagtgaatgaccctaagcaagttccttctcctcttagggccttgtgccaagcctatgaaattggaggtggctttcctgctctaaagcattttgatgtctcattctgtgtttggtaacccctataaactggggcagaggaaaagaatgatggttcaaggccatacttcccttgaaccttgtgtggttcttgcctaactctgtggtttttggaccccatggggcccagacagagcacaggagcatgggctgcctctgagtgtggtgttgaacttcgggaggagcagggagccctgcaccttgtgtcctggcccacctgacctttggtgttctccggatccttttcagcccgaggcctgacagacgcgggcagtgatgagccctgttctggagtggaaagagcacgatagagcaccaggctaagaggcacgagatcaaggcggtagtcacttccgctctgcagctagcatttcaaccatatgtggatcctttcatttctcagctccctggattccttcccctaaattaggacctattatttacctgtaggtaagcaagctactgtagctcttctgaggtatctgccaggctgttttctgtagcctcagattgcctatctgcttagcctgagaacaggtagatgaaaactaaactgatgcctaggcccagggtcagtctcagatggaagctgggcctgggtggggaggctagcatgcgtggctccctgggtatttctgtcagtccccatggcaagcagtgatttagtaaaacaccccagagtcagggaagccaaccaccttgaaacctttagaacatctctgctttggagaaagacccagagatcaggcagaggtgcagattcaatcattactcataacctttgagagctggcaaatgggaggagtgttagtctttgttttggaattggaccattcttgcaaccaaaaggacttagagcagtttgctcataaagacatcctttattataaaaggaagtatttaaaggatgatagagaccatcagatagaagcagggaaggtagataacttttaggaccttgatgtgaggaaaagataaaatttaaacaataaatttgccacttagattttctagcagcaaagtccgaaaagatagttatatacaaaattctgttttctgaaaacaaaattgtgattcaccttcagaattggccattttttttgtgagtttccttgcatcaaggacactgagaaacacagtcattgtcttaggtgttctatgggaggaagtgaatagagcctttaggaacttcctggtcaagcttatggtgcttattttgatctgggccacttccctccttccagtcatgagtaatcatcaaggagcaagttggagtgtttcaggtgtatattttgtagaacccaaaagattggagccttaacaataaacatcagcactaagtgacctgttaaaaaa

SEQ ID NO: 16 - DNA, 1924 bp, homo sapien
cctctgagcccagccctccctagcatcaccacttccatcccattcctcagccaagagccaggaatcctgattccagatcccacgcttccctgcctccctcaggtcccagctcttgctcctgcctgtttgcctggaaatggccacgcttctccttctccttggggtgctggtggtaagcccagacgctctggggagcacaacagcagtgcagacacccacctccggagagcctttggtctctactagcgagcccctgagctcaaagatgtacaccacttcaataacaagtgaccctaaggccgacagcactggggaccagacctcagccctacctccctcaacttccatcaatgagggatcccctctttggacttccattggtgccagcactggttcccctttacctgagccaacaacctaccaggaagtttccatcaagatgtcatcagtgccccaggaaacccctcatgcaaccagtcatcctgctgttcccataacagcaaactctctaggatcccacaccgtgacaggtggaaccataacaacgaactctccagaaacctccagtaggaccagtggagcccctgttaccacggcagctagctctctggagacctccagaggcacctctggaccccctcttaccatggcaactgtctctctggagacttccaaaggcacctctggaccccctgttaccatggcaactgactctctggagacctccactgggaccactggaccccctgttaccatgacaactggctctctggagccctccagcggggccagtggaccccaggtctctagcgtaaaactatctacaatgatgtctccaacgacctccaccaacgcaagcactgtgcccttccggaacccagatgagaactcacgaggcatgctgccagtggctgtgcttgtggccctgctggcggtcatagtcctcgtggctctgctcctgctgtggcgccggcggcagaagcggcggactggggccctcgtgctgagcagaggcggcaagcgtaacggggtggtggacgcctgggctgggccagcccaggtccctgaggagggggccgtgacagtgaccgtgggagggtccgggggcgacaagggctctgggttccccgatggggaggggtctagccgtcggcccacgctcaccactttctttggcagacggaagtctcgccagggctccctggcgatggaggagctgaagtctgggtcaggccccagcctcaaaggggaggaggagccactggtggccagtgaggatggggctgtggacgccccagctcctgatgagcccgaagggggagacggggctgccccttaagtgtcggtgaatagtgaggctggaggccgcaatctcagccagcctccagcaccttccctctcaccatcccactgccccctcgctcccatgtttccacccggcaccctgatcctcacccgaatctcctttttttttttcttttgagacagagtttcgctttgtcgcccaggctggagtgcaatgcacgatctcagttcactgcaacctctgcctcctaagttcaggcgattctcctgcctcagcttcccgagtaactgagattacaggcacccaccaccatgcccagctgcttttttgtatttttggtagagatggggtttcaccatgttggctaggctggtctcaaactcctgacctcaggtgatctacctgcctcagcctcccaaagtgctgagattacagacatgagcctccgcgccttgcctcctcacccacctcttcactctgaatcctcatgaggcttctcagccctggatttcctgctgccatcctcacccagcacccacaactagcgcctgggcagggcagggctggcacctctcaacgtctgtggactgaatgaataaaccctcctcatccacccct

SEQ ID NO: 17 - DNA, 1652 bp, homo sapien
tgccccctcccgctgcggctctctggacgccatcccctcctcacctcgaagccaacatgaaggagacccggggctacggaggggatgcccccttctgcacccgcctcaaccactcctacacaggcatgtgggcgcccgacggttccgccgaggcgcggggcaacctcacgcgccctccagggtctggcgaggattgcggatcggtgtccgtggccttcccgatcaccatgctgctgactggtttcgtgggcaacgcactggccatgctgctcgtgtcgcgcagctaccggcgccgggagagcaagcgcaagaagtccttcctgctgtgcatcggctggctggcgctcaccgacctggtcgggcagcttctcaccaccccggtcgtcatcgtcgtgtacctgtccaagcagcgttgggagcacatcgacccgtcggggcggctctgcacctttttcgggctgaccatgactgttttcgggctctcctcgttgttcatcgccagcgccatggccgtcgagcgggcgctggccatcagggcgccgcactggtatgcgagccacatgaagacgcgtgccacccgcgctgtgctgctcggcgtgtggctggccgtgctcgccttcgccctgctgccggtgctgggcgtgggccagtacaccgtccagtggcccgggacgtggtgcttcatcagcaccgggcgagggggcaacgggactagctcttcgcataactggggcaaccttttcttcgcctctgcctttgccttcctggggctcttggcgctgacagtcaccttttcctgcaacctggccaccattaaggccctggtgtcccgctgccgggccaaggccacggcatctcagtccagtgcccagtggggccgcatcacgaccgagacggccattcagcttatggggatcatgtgcgtgctgtcggtctgctggtctccgctcctgataatgatgttgaaaatgatcttcaatcagacatcagttgagcactgcaagacacacacggagaagcagaaagaatgcaacttcttcttaatagctgttcgcctggcttcactgaaccagatcttggatccttgggtttacctgctgttaagaaagatccttcttcgaaagttttgccagatcaggtaccacacaaacaactatgcatccagctccacctccttaccctgccagtgttcctcaaccttgatgtggagcgaccatttggaaagatgagaaaaagaagactcagagagcaattctggaggccggcaagttcaggatcagggtgccagcagattcggtgtctgactggagtgcagtggagtgatttccgctcactgcaaccttcacctcctccactcactgcaatcttcgcctcctgggttcaagtgattctcctgcctcagcctcccaagtagctggaattgcacgatgcgccacaagcctggctaatttttgcatttttagtagagatgagtttcaccatgtttgccaggctggtcttgaacacctgacctcaagtaacccacccaccttggcctcccaaagagctgggattacaggcatgagccaacgtgcctggccatgttctgatcgtttaatgatagcaacatttagtattatagagcatgaaaatgtcaaagccgcccggaattc

SEQ ID NO: 18 - DNA, 1825 bp, homo sapien
ccaagaggtgggaacaatctaaatgtccaacagatgaatgaatttttaaaaagtggtatatatacatacattgagatattattcagccttaaaaaagaagaaaaatcatggccgggcgcggtggctcacgcctgtaatcccagcactttgggaggccgagacgagcgaatcacgaggtcaggagatggagaccatcctcattaacatggtgaaactctgtctctactaaaaatacaaaaaaattagccgggtttagtggtgggcgcctgtagtcccagctactcaggaggctgaggcaggagaatggcatgaacccgggaggcggagcttgcagtgagccgagatcgcgccactgcactccagcctgggcgacagagcgagactccgtctgaaaaaaaaaaaaagggaaaaatcctgccacatgatatggtatgggtcaaacttgaagacattaagctaaataaaatgtcagtcacaaaaagacaaatattatatgattccactcacatgaagtatcaagtaatcaaactcacagaaaaagaaagtaaaattgtggttgccaatggttcagggtgaaaaaaagggagttagtgtttaatgggtaagaggttcagtttcgcaagacaaaagatttctggatatttgttgcacaacagtatgagtataattaatgctacagaactgttagaaaagagtctctttcagatttagatactagaaaatgtatgagtaaaatacgatgtctgaaatttgctttcaaataatctgaaggctggttggggaagttgttggagtcatacatgaaataaaactggtattagttgacaatccttaaaactgagtgggtttattataccattctctctctacttttgtgtatgtttgaaattttccatcataaaggagtttttaaaaacccaacattatcaaaatgaaaaataatcaatacaagtgctggataagaaagtcaaggaaatatcacagaatgtataatttaaaagatttgctgaggtgtgtgtatcacctgagctcaggagttcgagactagcctggccaaaatggcataaccccatctctacataaaatacaaaaatcagctgggaacactggtgcacacctgtagtctcagctactcaggaggctgagacacgagaatcacttgaacccaggaggcagaggttgcagtgagctgagatcacgccattgcactccagcctgggtgacagagacagactctgcttggtcacttttttggcggaggagaatgcagttaaaaaggacatgtccccggggattcgactacacttctcaaagtgtactgctggccctctgtatccatgggttctgcatctgtagattcgatcaactcaactcctggctcaatactgatggaagtaatctgcttaacaatctcagaaggactgtgcaagtcaatgagtcgcttgtgaattctcatctggaaacgatcccacgtcttagaaccttcaccacaaggagtttttcttgtagtgattctcaaagtcttggtaggcattcgaactggtcctttcactttgagattcttttcttttgcgcctcttatcaagtcagcacacaccttttccaaggattttacgttgcggcttgttagggtgattcgaattcggtgaattgccacctccggctccacgggtgtttttccggtatccttaaaagccatggctgttgcgcgcgggcttcctgaccgacttgttcctcggcgagagcgaacagcggtgagtcaggagcaggagcgtgcggaccaaaaatcctcagcccttacgaccgcgtcttcctcaaaaaaaaa

SEQ ID NO: 19 - DNA, 120426 bp, homo sapien
gatctttgacacagaagatgcgagcagctgcacaatccaacagcctgggctaaaacagaagccctggggacaaacctgaagaacgatcactcgtgaaactcctcgcagcaagaaatctgaggtcatcttcaaatcagcagggaaacaaaaatttagagaattatcactctcagggagagactaccaagaatatctgtgaggattgcagggtcaatgtcaagatgctgggctttgttcgctaaaaaaaacactatgtggccgggcgcggtggctcacgcctataatctcagcactttggaaggccgaggtgggcagatcacgaggtcaggagattgagaccatcctggctaacacggtgaaaccccgtctctactaaaaatacaaaaaattagccgggcgtggtagcgggcgcctgtagtcccagctactcgggaggctgaggcaggagaatggcgtgaactctggaggcggagcttgcagtgagccgatcacgccactgtgctccagcctgggcgacagagcaggactccatctcaaaaaaaaaaaactatgtatgagactgtaatctgtaattaggacacttcttgaataccactaaagaatatttacaatattgcaattgagtaaaaattgaaaataaaacctatgacagttaaacctattctgcaagtactccacgatgcattaaaaaaaaaaaaaaaaagttggccatgcgtgatggttcacgcctgtaatctcagcactttgggaggccaaggcagacggatcactcaaggtcagcagttcaaaacaagcctggccaacatggcgaaaccctgtctctactaaaaatacaaaaaaaattagccaggcctggtggtgggcacctgtaatcccagctactcaggaggctgaggcaggagaattgcttgaaccagggaggcggaggttgcagtgagccaagatcacaccattgtactccagcttgggcaacaagagcaaaactccacctcaaaaacaaaaagtagctgaccgtgtgtggtggctcacgcctgtaatccctgcactttgggaaaccgagggggggccaatcacctgaggtcaggagttcgagatcagcctggccaacatggtgaaaccctgtctctattaaaaatacaaaaattggctggacacagtggctcacacctgtaatcccagcactttggggggttgaggcaggtggatcatgaggtcaagagttagagaccagcctggccaacatagtgaaaccctgtctctattagaaatacaaaaatttgccaggcatggtggcacacacctgtagtcccggctactcgggaggctgaggcaggagaatcacttgaacccaggagatggaggttgtggtgagctgagatcgcgcccctgcactccagcctagcgatagagagagacttcgtctcaaaaaaaaaaaaagaaagaaagaaaaaaaaaattagccaggtgttcaggcacctgtaatcccagctactagggaggctgagacaggagaagcgcttgaacctggaggtggaagttgcagtgagccaagattgcgccattgcactccagctgagcagcaagagtgagactctgtcaaggaaagggaaagggaaagggaaaaggaaaagaaatcgctaactaggccgggcgcggtggctcacatttgtaatcccagcactttgggaggccgaggcgggtggatcacaaggtcaggagggagttcgagaccagcctgaccaatgtggtgaaaccccatctctactaaaaatacaaaaattagccgggcatggtggtgggtgcctgtagtcccagctactcaggaggctgaggcaggagaatcacttgaacctgggaggcagagcttgcaatgagccgagatcgctgctgcactccagcctgggtgacagagcgagaccccgtctcaaaaaaaaaaaaaagaaaaagaaatagctaactataggaaggaggaaaaaaaaagacaaaatgatcatttgcagctacaagttaagtattccttgtataaaatgcttgggaccagaagtgtttcaaattttgtatcttttctgattttggaatatttgcatatatatatagtgagatatcttgagaatgggaccgaagtctgaacacaaaattcatttatgtttcatatacgccttagacacatagcctgaaggtaattctactcaatattttaaataattttgtgtataatggccaggtgcaacggctcacacctgtaatcctggcactttggaaggccaaagcaggaagatcgcttgagcctaggagattaaggctgcagtgagccatgatcttgccactatacttcagcctgagtgacagagcaagatcccttaaaaaaaaaaaaatttgcatatgaaataaagttttgactgcaacccatgacatgaggtcaggtgcggaattttccactcgtggcatcctgtcagtgctcaaaagtttcccattttagatttggggattagaaatgctcaatgtgtattatgattacctatctaagaaactcaagagaatctactgaaaaataagaacaacagagtttggttaagtagcatagcagacacggtgctattacattttcctcacggacacaccaaaggactccacttcccagcccccttgcacctaaaatacagccaacagaccgcagaagaaatactactacttccaagcttggcccatgaaaaaaacttccatgcacaaaattacacggcaaacttaaggtcacatcttcttgtcagttgtgacaaaaatggaaggagcccagatccccaagtcaccacttagaaaagaaccatctaaaaaagtgtgagcaagaaataaatgttttctttgtcaggccacagattttaactagcattacctaccctgactaatacaggttataaaacatacagactggccaggtgcagtggctcatccctgtaatcccagcacttcaggagaccaaggcagaggattacttgaggctgggagctggaggccagcctgggcaacacagcaagattccatctctagcttattttttattttattttatggttttttttgagacagagtctcactcagtggcctgggctgaaatgcagtggcgcgatctcgactcactgcaacctccgtttcctgggttcaattgattcccatgctactcagcctcctgagtggcagggactacaggcatgcaccaccacaaccagctaattttttttttttttaatagagtgggggtttcaccatgttggccaggctggtcttgaactcctggcctcaggtgatccacccacctcggcctcccaaagtgctgggatttcaggcgtgagccactgccccggcctccatctcttatcttattataaaaacaaggccgggcacagtggctcacgcctgtaattcccagcactgttggaggccaaggcaggtggatcgctagaggtcaagagttcaagaccagcctgaccaacatggtgaaaccctgtctttactaaaaacacaaaagtggccaggcatggtggaacaggactgtaattctacatcggaggctgaggcaagagaatcacctgggagaaggaggttgcagtgagctgagatcgcaccactgacgccagcctgggcaacaagagcaaaactccatctcaaaaaaaaaaaaaaaaaaaacaacccacagcatacaaactgcaagcagtatacttgctttatacctgctctataccagttagtaatagcgggtgggagggaggtgtgaggggagataatcgcattctaaataccaaatattttctttgtttttgagcagggtgtctccctctattgcccaggctggagtgcggtggcaccatcacaactcactgcagccttgaactcctgggcttgagttctcttcccacaatcagcctccctagtcagtgggaccacaggtatgcacaccaccacgccaggccactttaaaaatttttgcagacatggggtctcactacgtttcccaaactggtcttaacctcctgacctcaagcaatcttcccatgtcggcttcccaaagtactgggattacaggcataaatcacatgtccagtccagcaaatactttaaaataaagaataagtaatcagccaggcatggtggctcatgcctctaatcccagcactttgggaggccgaggcaggtggatcacaaggtcagcagttcaagaccagcctgaccaatacggtgaaaccccatctctactaaaaatacaaaaattagctgggtgtagtggtgcacacctgtaatcccagctactcaggaggccgaggcaggagaattgcttgaatccaggaggcggaggttgcagtgagctgagatcacaccactgcactccagcctgggtgacagagagagactccgtttcacacacacacacacacacacacacacacacacacacacacacaaaagtaatctatagaccacatattaggaaaaatctagagacactgactttttctgttcatacacagaacaagtcaatattataaagatgacaagtctccccaaattaacttatgcatttaatgaaatttcccattaacagtattttgacagcctggccaacatggtgaaactctgtctctactaagaatacaaaaattagccaggcgtggtggcacatgcctgtaatcccagctactcgggaggctgaggcaggagaatcacttgaacctgggaggcagaggttgcagtgagccgagatcgcgccattacactcaagcctgggggacagagtgagactccatctcaagatggagggagtattttgaaaccctaaattgaaaaacactggagtaaaaactgagcataggcactaccagataataaagcctactataaagtgattttaatgtctaaaatagtaaggtcatggcaaaagaacagataaactgactaaaacaacagatccaaggattcagcatatgattaaggtgttattttttaagttaataaggatgaattaatagtacccaaaaaatataaactagaggggacaaataatccttacttcataccatactccaaaacaaatatcagactaattatagccaatttttttttaaagaactaagagaaaacatgagtgaatacctataaaatttagggataacaaagccatgggaaataaaaaaagattgacagtttttttttttttttttttttggagacggagtttttcgctcttgttgcccaggttagagtgtaatgaggcgatcttggctcactgcaacctccacctcccgggttcgagtgattctcctccctcagcctcccgagtagctgggattacaggcatgtactaccatgccgggctaattttgtatttttagtagagacggggtttctccatgttggtcaggctggtctggaactcctgacctcaggtgatctgcccacctcggcctcccaaagtgctgagattacaggcatgagccaccgcgcttggccaacagacttgaatttaagtcaaggcatagaaaaaaatatttgcaaagtaggacaaaaaaatgcaaatcttaacacaggttgagtattcctaattcaaaaatccaaaatttgaaaggatccaaaatttgaaaggctccaaaattcagtactttctgagtgccaacaagacactcaaaagaaaatgctcagcctggcgcagtggctcatgcctgtaatcccagcactttgggaggccgaggcaggtggatcacgaggtcaggagatcgagcccatcctggccaacacagtgaaaccccgtctctactaaaaacacacacacaaaaaattagccaggcatggtagcgggcgcctgcagtcccagctcctagggaggctgaggcaagagaatggcatgaacctgggaggtggagcttgcagtgagctgagatcgtgccactgcactccagcctgggcgcgccactgcaccccagcctgggcgacaaagcaagactccgtctcaaaaaaaaaaaaaaaggaaacgctcactgaagcattctgaatttcagattaaaaaattaggaatgctcaactggtaagtatagtgcaaatatgccaaaatccgaaaaaaaaaaaagaaaaaaagaaacccaaaatccaaaacactttctagtcataagcacttcggagaaggtatattcaacctgtacgtgtttctcaagcaggtcaagatcaaaaacaatgtatctagtagcatcaactttactcaaagaacatggaagaaaaatgttttatattaaaacaagcactgatgtttctgaaacagaatgagaaattcacattaattttagataaaacagaagagacttaaaagaagtgtcatgcttgttatattccaaacacttttaaatatgcatacattcccccatatcatgcatctgtggaaaaatttgtgaagcaatgtctataaatataaatatcaaaaaagctcttgataagaaatatatgaacttgggctgggaacagtggctcacggctgtaatcccagaactttaggaggcttgagctcaagagttcgagaccatcctgaccaacacaggagacccccatctctaaaaacatagtgaaaccctgtctctacaaaaaatacaacaattagttgggtgtagtggtacatgcctgtagtcccagctactcaagaggctgaagtgggaggatctcttgagcccgggaggcagaagctgcaagtgagcagagatctcaccactgcactccagcctgggtgacagaccctgtctcaaaaaatatagatacatgaattcaatagaaaattctcagcactgaccacatataccttactgtgaagcaggatcaccaaactttttctgtaaagggccagagttacatggtctcttgagtgagcttggctgtgttgcaattaaaccttatttacaaaaccagatgctggtgatgcctccaccagcaacatccctgtcacctgagaacttgtgagaaatgcacattttcggggtccaccctagatcttcagaatgagatccatgtttgacaaggaaggtgttgtagttagcccccagctaggtgatctgcctttggagacaggaaatgattttagccagccctggagaggagtcaataaagccaaaccgaatttgaggctgaaatcccatctaaagtagaatgtataagaaattgtgttggccaggtgcggcggctcacacctgtaatctcagcactttgggaggctgaggcaggtggatcacgaggtcaggagttcgagaccagcctgaacaatacggtgaaaccccgtctctactaaaaatatgaaaattagccaggcgtagctactcaggaggccgaggcagaagaatcgcttgaacccatgaggcggaggtttcagtgagccgatatcgcaccactgcactccagcctgggcgacagagcaagattccgtccccaaaaaaaatatgaaaatacaaaaattagccaggcgcagttgcagtgaccgtaatcccaactactcaggaggctgaggcaggagaatcgcttgaacctaggaggtggaggttgcagtgagccaagatcgcaccattgcactctagcctgggcaacaagagcaaaactctgtctcaaaaaaaaaaagaaaaaagaaagaaagaaagcaattgtgtttccttcatgaagactgaggacacagcagtgctttcggtctgaagcagggtggagaagaccctcagagtcacaaagccaagaactctgagatgaaatgatggtccaaaatgaaaaagcttattcaaatttaattgaatggagctgggggtatgtatatattcacttgaacaaaggaaagccagtggggggaaaaaatgtgtgagcgttgaggtggtgggtagaagattcctacaggaacaaacaagggaattgacagaaagaatccaagctagggtgcataaaggcaaacactgtagccaggaatgaaccacaggcaaacaaggcaggagcaagaggagacggtcctgctcccattcagcctcagcctcctcccagtgcaccctttactccaccccaaaattttctaaaatgcacatctgaacaagtcactccccttctgggaatctccccgtgcctttccagacaaagattcaagccccataatacagtatcaaaggacctctccacctgacccccatcacatcctcagcatccttccaactgtcctaactcagttaccctctcccagtcacatgcctctcctgctccaccctttgctcacactgatccctcgatctggaatgtcattcccaacttctgtagcctaaccctactttctatcccaagtccccaaaagtcatcctggaacacagcatgattagagtctaacttcgagcttggcaactgaccggcctagggtcaaatcctgactctacttgtcagcgctaagaccctaggcaagaagctgccctcctgccacacctcagcatcctcagctgtaggatgaaaagcgttaatacccagcccacagggctgcagagactgatcaacgtgaaagaacacaggagtgctgggcagagctccctggcactcaactgacactggcttctctgccctcttctatactaacgagaacttagaaaccctgagtttcagatgagagctgggaatagtgttctacagtggtttaatggaacagaattcaagactcaggaattaacttacagaagttacccaagacttcatcaataaatgaaggaccagaagccaccttgcctgccagttgctaggactagcaataataacctaaagtgcccaatgcataatcaatacctatgggcaccatcactgtttccttggccctatcacatggggctctcttgtctttctagggtcccttctattgcttggagagggtccaacagagaagcgcaccttatcaaactgcacttccattcaacttagaagatagagggattcatctctgtaagagttacacacatagatggatgacctccaccaggtgctcaatgagatgatgcctttgggaaggaagcccgagccatcagctgctttgagcaaaactcatgagtgggcaaaactcatgagtgggccaggcacggtggctcatgcctgtaatcccagcactttgggaggccaaggtgggcggatcacgaggtcaggagtttgagaccaggctggccaacatggtgaaacaccatctctactaaaaatacaaaaattagccgggtacagtggtatgcacccataatcccagctacttgggaggctgaggcaggagaatcccttgaacccgggaggcagaagttgcaatgagccgaggtcacaccactgcactccagcctaggtgacagagcaagattccatctcaaaaaaaaaaaaaaaaaaaaaaaacaacaactcatgagtgaagattttcctgatcactgaccagagaaaaccactctcctttaaggatggaatttccatagagggccttagagacacctagatctgaggtcacagacttggctgaggtcacctgaggtcaaagtcgaaaattgggacaaaggacaatgagaagctcccaagatttatatttccattgaggatgaccttccccaaaaatctccacccttgcttttctgctgcatttgggtatgctgggttggcatcacaacttaacatggcctaaaccagctcctccagcatctcagttaatggcctctttctttctaggtgctaagaccagaacctcggagtcctcctcagttttctttctggttcatcagcaaatctcaacctcaccttgaaatcccactagtctcccctcagccctgcattctggctggtctccttgctgtcctgccttcaatctgtctcacacagcaacgcctagagtgtgcttgctaaaagctagatcagtccacctcccttctttactccaaaaccctccaatggcttctaccaccctcaaggtaaaatctaccagccttacagtggtccgcatggccttacatgatctgacccccatggtttctctgacctcaagaccaaattctcccctcctcctgcctcagggcctttgtatctgctgtttcctcccctcagaatgatccttctcccagatctccacatgcctcactccctacacatctttagttaaaaatgactcaagccctctgctatgaactcaactgtatcccccaccaccaccgaaagaattcattatattgaagccctacccccacaatgtggctgtatttagagatagagcctttaggaggtaaccaagtttaaatgagttcttaaggatggggccctgatccaataggaaaactttatttttttaaacaaagtagctttgtcacccaggctggtgtgcagtggcacaatcatggctcactgcagcctcaacctcttgggctcaagcaatcctcccacctcagcctcctgagtagctgggactacaggcactactaccacgtccagcgaattttttattttattttattttattttgtagagacagagtcttattatgttgcctagactggtctcaagtgatcctcctgcctcagcctcctgaagtgctgggattacaggtgtgaccaacagtgcttgaacagaaagataaatggcaccaagaaaaggccatgtgaggactcatcaagaggatggccacctacaagccaggaagaaagccctcaccagaaactaaagaggccagaaccttgaccttggacttcccagactccagaattatacgaaacaaatttccgttgtttaagccacccacactgtgctatttttgttatggcagtgttagcagactcatataccttcctccctgtctacccttccaaaaatatcaactcccatccccacacttaatcccccgagccttgtcagattcctcttcacagaaccagatctcattgtccacatccctacagtgtgggctccatgtgggctgggaatctccctgcagcatcccaagcaccaagaatattacccagcacagatcaggcactcaatgtaataaatgtatgaaaggcctatgaaaggtgcaagctgaaagcagacctcaattacaggagagccaagaacctagaacctgtgacgaaataacaggttcaaaatagcaaagccacagagaaaatgagaagaacggcatagcgcacaaagggctcgtttcaacctagaggctgcaatgcacagcttaacctggaggaggatggttccctacagaaagaataaaagcaagcccagagaacaactggaggaatagcagggcatgaaaatgaattaatgaggtgaggttactgggcactgggaaccaacagactggtgtgtgagagttttatgggcaaggccaggaaacggttcaggaaggactgtaagatgtttaaatttaaaaagcctaagaggattaaatataaatacgtttttaaaaagcttcaatttacatgtacaaagcaccatataatttcaaatcattactgttgatctttttttttttttttttaggagacagtctcactctgtcacccaggctggagtgcagtggcacgatctcgactcactgcaaactccacctcccaggttcaagcgattctcctgcctcagcctcctgagtagccggaaatacaggcatgcgccaccatgcccggctaacttttgtatttttagtagagacgaggtttcaccatggtggccaggctgctctcgaactcctgagctcaagcgacctgcccgcctcagcctcccaaagtgctgcgattacaggcatgagccaccatgcccagccccggcctactgcttttaattaccttaaccaaaatgggaaaattcctcaagctaccagtggtaccagaatataggtccccaaatagatccctggtttgtctttagagacactgaagaggacaacaatagccaattcgggatttcaaacaccccacaaactagaccttaggctctgtgagggcaaaagacacagtttattcaacaacgatctgttcaacagaacctggtcaccaagtggatggatggatgggcagacacagatggacagactactcagtgggtggctacatgtgcttgcctgccccgggacacatgactcacttctgcaatgctacatagactagagtttgctccatcaatgagatagatagtatggcatgaaacctagcaaaaccatctacatttttctagccaggtactggttttttttaagctggccgccatactcagctattttttttttttttttatagaaacaggagtcttgctgggttgcctaggctggtcttgaactcttggcctcaaacaatcctcccacctcagcctcccaaagtgctgggattacaggtgtgaaccacaacacccggcccaggtacttcaataggcattttttaaacatgtcaacagatgtttaaacttaattgacttaattgaccgtgccacagtcagagaatacaactgccagacaaccatctaaaatactgtcaacataaaaagttcctgaaatacctattgtcttaaaaaatcaccctccactctaagcaaagaaaccaaaagagaaatgccttggtattaaaagaaagaagctggttgccattttggcaaaggaaatagcctagaaagcagatacctcatgctcaggatgtcacatggaacaggctggacacacctgctgcctccctttaactagcaggtgtgccatgagagcttacactgggcacacccactggtgcccaaaagccattaaattggggatgaatgaaaagagaacagtagtaatacgttcataagtgaccctgatagagccaaccataacccagcacagaattctgattttttgagctgaaaagggccctttatacatctcaccaggttcaaacaccttcaggggaggcaggcaacgtcacctgcaacggtgaaaaaggcaggtgtagacaaccagaaacggtgaggcccaaacccaacagcattcaaatacaaaagcataaaataaaaatgctccagccaccccaattccagccttttgcttcagagaggacgaagccggctgagggaggtcacatggccaattagtgacagctcaaaccagactgcctccggactcccagtcccatgtcctcgcacatcccggggccttctctgcgcgcagatgacccaattgtcagcagggactgcatcttcccccgcccgtctcccagcactgcaagaatagaagtagcacctactacaaacgctgcagacccagaaagcccttatgggtgactttcttccacctgcagttgccctcatttaccctttgccctgacaatcgataatttcccatcagtcacgcttaaacccccagcctgcaggccgacatcctatcagccacccatccaagggggggcatctaggaccaaacgaaggagaaaatcctgcgccttaaagtagtcacactcgaaatgtcattttttccccccgaaaggtggcaaggagggggactcgcgaccccccagggaacaggccagaaaggccccggggtcggaggagctgcttctaaaattacttcgcgcagtctttgtagaagggaagaaagcaagaatgtaaaaggcaccctcttgccgcccctcctgatgcccctgaattccagggggcgagacgatgcccgtgcgcaccaccgggggaggggcgagggaagcgaccccaggacgcgcgggcgcagagcccgggaggaggcggcggcagccagtggggttctgggggcgccccatttgcctccccgctgcgcggcctgagggcccgagcgcgctgtggctcccgtggcgggaaggggtgggtaccccgggggcccggcccggccggcagaacggcaggagctgagggccgccgggcatcttgggccccggggccagggtggccggcgggcgcggggtcccgggagatgggtcggggtgggggcgcgcaggccgcgccgcggggccggtgggtgacagcgcgcgggggccgtgccaggccggcctcgtgggcgcggcgagcacctcgcggccccgccggcaggtgcggcccgcaggccgggcagggggcgcggcggccgggctctcacctggctgcagctcgcgtggttcccgtcctgccgccgcgcctcggcgccgcagtgcccgctgcagcctccgcctccggtccccgcgacagccgcctgcaaaatggcgccgcggaggggcgggccgggggcggggtgcagcggagccgcccgcccccgcgccggtctggggcccacctccctccccgcccccgacccctgccctcgggcctccccccggggaggggctgctccctggcacccggcagcgctccccggaacatcccgggcctcgcacccagccgtccccttcccgttcctttcatttccctcccctgcgcagaaagatcgccccccttcgcgacccttcccaccagtcacacctgttcctggggacccacctggcaagcagagcgctggtccctgagtgtcctggtccaggtcccccctttttaccccgcctgccaccgagccctgtcattgctcgagcgtgataagcaagcagtttgtggtgcattgggctcagtgggttggatgttttaaaacaatttcaccgcttctccacttaggtagccagtttttttaacctaactggagaagaagtccttcttacctcatgcagagatcgtaatacagaccaaggcttttcagacgtgaattctctgggggtcgtgttaggctaggggcgggttcacattcagtggctctggggtgcagcccaaaagtctgcacttctaaattgtccccaggtgatgcccccgggtgaggttcttggaccgctaagcagaaaggccaagtgtaaatccctggccctcggtcttagagctgggcagcctcactttgaggacttcattaagatgcagatggctgggccccacccccagagttgctaaggctggaggtctggcgtgaggctccagaatctgcatttctgccaagttcccaggtgatgctgatgctactggtctggggaccacacgtattgagccactgctgaaatctgaatacaattttttaaatgttctaataattagtactttcttaacaccttccatcttgaaaccgttgtcatggttgctttactaactgaatgataatgtactagttcccgggcaactcttgagaaacagaattgtagacggtgtctgtctgacctcacatggagagaaattgattttataatcagaattatttatgtgttttacacagttttggaaagtgacatcacacatattaatgcagttgggggagcagcaactaaaggaattttatgaaataggcaagtgtggtctgtgtcttgacaataatgtgtcttcccatttatttatctaataactgcatttttatttgcttatatttaattttttagagacaaggtctcactctgtcacccaggctggagtgcaacggcacaattaaggctgcagcatcaaccttccaggctcaagggatcccccaaccttggcctcctaagtagctgggatgacaggaccacaccaccaggtccagctaagcttggttttatgcgtcacgggcgcccatccttaaccttgacaaaatgaaccttctaatttgactgagacctgtctcagatatttgaagttcacaatccctactgggattcagtaagtagggaaaagaaagtgttggattgcaaaattcaataatgtcgaatgttttgatccccgttgaagatggagaaaataaaaaacaaagatgcggccgggcgcggtggctcaagcctgtaatccgagcactttgggaggccgaggcaggcggatcacgaggtcaggagatcgagaccatcctggcaaacacggtgaaaccccgtctctactaaaaatacaaaaaaattagccgggcgtggtggcgggcgcctgtagtcccagctactcgggaggctgaggcaggagaatggcgtgaacccgggaggcggagcttgcagtgagccgagatcgcgccaccgcactccagcctgggcgacagagcaagactccgtctcaaaaacaaaacaaaacaaaacaaaaacaacaacaacaaaaatgctgtgaccagcacccagagaaaaactcacgcattgccccgtaaccatcattctacaccagtgagagcatagagcgtattccagccaaccttttttttttttttaatacgatgtgtttgcttagcaaggaatgtggagtcttctgattagaagggaagggaagttccagggtcaagaccccctgagcttttaagtctatcccctccccatcgttattccatgaactgtggaatcttcagtgtctccctctccctctctaggcatttaccatttttctctatcctgaaaaaccttccatagtcccagtctgcccagccgtcctgcctgccttcctctgcccaacctcccctgccatcacccctcaggcactgtccctccctgttttatcagatgtcatctgtgaccttctaattgccaaaaccaattacaggtttacagtccttttcttctttgatggctctgtaacagtccactgacttctcactcgaaattctattcttgtgataataccactgtttcttgctaactatccatacaccccccttccctctcagtgatgtgagtttctcagactccagtctagaaatgttagtttcccctcatatctcctttctcccctgccctctccttctctaaccccctctgaaggtcagccatctcctcgtggttcccaaacctctctccctagacaagacagacatctttctgaacttgtagacacatttccaattgtcccttgaacaacctgccctgaatattctccaggaattgcaaataatctccactattgatgcattattttctcccataaactggtttcttatctgagttctctcattttgctaccagaaacttcaaactggtctttgagtccttgccccatagcctacatgtccactctgtcacctgtggtcaagctgggaagtatttctgaaattctcttctcatccaacacagatactgaccctcactggctctttcttggactgttaaccatcgaaaaagtttctctctggcctgttggactcaagactaatctcctgaaactatccttgttatcatcccagagcacagaactgataatctcacaccttttctgaaaatccttcagggcctcccagtcaaaaggataattggagaccaggcacagtagttcacacctgtaatcccagcattttgggagaccaaggcaggaggatcgcctttgccaggagtttgagaccacactaggcaacatggggagaccccatctctgaataaataaataaataaattaattaattaaaagtttaggccgggtgcggtggctcacgcctgtaatcccagcactttgggaggccgaggcaggtggatcacctgaggtcgggagttcgagaccagcctgaccaacatggagaaaccctgtctctactaaaaatacaaaattagccgagcatggtggcgcatgcctgtaatcccagctactcaggaggctgaggcaggagaagcgcttgaacccaggaggtggaggttgcggtgagccgagattgtgccattgcactccagcctgggcaacaagaatgaactccgtctcaaaaataaataaataaataaataaataaataaataaataaaaatttaatagctaaataaagaaagaataaacctttcccagtgtagcattcaaggcccttaatctctagtctcggcttctttttcttcttttttttttggagattttactgctgacaaactggctttggtatcagcagatagctctgacttctgtctttcaacgtcttacaaggattaaatgtatataaagtgcttattcagtgcatgaatatgtaggtgttcgatatcattatttttacataattatttttaccattatcatcaattaaaaaaatacatcaaatttttcctcttcagttgcttttccttttattttccattcatcttcctttctattacagctcatacaaacaaggtttttttttcctcctcccttaacttctctaaactaaatcagcagaatatatcaagaacgtttcatgacctggttaatttgattgaaatttcagtcatttccaggctgtgttatttttgagaggtaattgtagcttggggctattccatcttcatacagtacttttcaatgttattttcaacatctctctggagtctagacctggggcaaacgttttctggaaagagctagataataaatgttttaggttttgtgggccaagaggtaaaattgatgacattatataggtacagtacttatataatgataggggccaggcgccgtggctcacgcttgtaatcccagcactttgggaggccgagatgggtggatcacttgaggtcaggagttcgagaccagcctgaccaacatggtgaaccccgtctctactaaaaatacaaaattagccgggcatggtggcgcatgcctgtagtcccagctacttgggaggctgaggcaggagaatcacttgaacctgggaggtggaggttgcagtgagctgagatcgcaccattgtactccagcctgggcaacaagagcgaaactccgtctcaaaaaaaaaaggtgacagtacttatataatgatagaaaacaaatttccacagatttcttattgatgaaattcaaaatataataatgattgagcataatatatttttttgtttgttttgttttgttttttgagatggagtctcactctgtcgcccaggctggagtgcagtggtgggatgttggctcactgcaatctcctccctctgagttcaagcggttctcctgcctcagcctcccgagtagctgggattacaggcgcctgccaccgcacccagctaattttttgtatttttagtagagacagggtttcaccatcttggccaggctggtattgaactcctgacctcttgatccatctgcctccgcctcccaaagtgctaggaattacaggcgtgagccaccgtgcccagtcatattgagcataatatttttataatacaggtctactaatgaaaataatagaatttggggggtggggaaaataagattttgcttacttggggttcaaagttagtctttcctatcatcaaattgatggcaaatgttcatctgtaaaagccattttatttatttatttatttatttatttatttattttgagacggagtcttgctctgttggccaggctggagtgcagtggtacaatcttggctcaagcaattctcctgcctcagcctcccaaatagctgggattagaggtgtttgccaccaccccccactaatttttgtaattttagtagagacagggtttcaccatgttggccaggctggtctcaaactcctggcctcaagtgaaccacctgccttggcctcccaaagtgctgggattataggagtgagccaccactcctggcctgcaccatctcttgatgtcagcagaattcacactttctacatctgtctcatactaagacataacagatctagggctgcgtggcaggaccaagacctgcctgaaatgacgtgtgtgtgtgtgtgtgtgtgtgtgtgtgcgtgcgtgcgtgttcaatgatgtgcattgaagcattgtttcaagtagcaaaacaaaaacaaaaaacctgaaaacaacctaaacatccatcgatcagggaatggctgaatgatctatgagataggcaccgtatagcatgtataccacgtaggcttctccccactccaccgccaggcttgcttttattttttttgaaatataattcatgtacccataatactcccattttaaggtatacattttagaatatatcatttaaagtaaacaattgtggccatgcctggtggctcacacctataatcctagcactctgggaggccgacacaggtggaccacttgaggtcaggagttggagaccagcttggtgaacacagtgaaaccctgtctctactaaaactacaaaaattagccaggcatggtgacatacacgtgtagtcccggctacttgggaggctgaggcaggaaaatcacttgaacctgggaggcagaggttgcagtgagctgaaatcgcaccactgcgcaccaacctgggcaatagagcaagactcagtgtcaaaaacaaacaaacaaaaaaagtaaacaattgtaaagtatacaatttggtggttttcagtatgttcacaaagctgtacaagtaccactaattttagaacatttttatcactcctaaaagaaactccatatctattagcagtcatttcctatttctcctcttcccccagccccggcaaccactaatcttcactctctttctatggatttgactattctgaacatttagtataaatggaattatatgaattatatactaatatgtggtcttttgtgactggcttctttcacttcccatgttttcaaggttcaactacattgtagtgtgcttcaatatttcattccttttttcattgtgataaaatatatgtataataaaattaactttttttttttttgagacagagttttgctcttgttgcccaggctagagtgcaatggcatgatcttggctaactacaacctctgcctcctgggttcaggcgattctcctgcctcagcctcctgagtagctgggattacaggcatgcgccaccacacccggctaatttttgtatttttagtagagatggggtttcaccatgtgggtcaggctgctctcgaactcctgacctcaggtgatccacctgccttggcctcccaaagtgctgggattacaggtgtgagccaccacgcccagccaaaatttacctttttaaccacttttaagtgtaccactcagtggcattaagtgccactccagcctgggcaacagagtgagaccttgtctcccccacaaccccctaccccttgaaaaaagagagcgtttaaatgcacacaccctgaactcagaatgttagttctggaatctgtctgacacaaaagcacactggtgggcacggatctatgcccaaggggctcaaagaagcagggtttgcttctgcctcctccaccccagttcactctgcagctccggcagatctgaagcccagctaatggaagtaacctcttaccctcgaatgaccccaaattccttacctaaccattctcccctactcccagcaaataaccttgcttcctgatttttggcaactggtcatgagaagggcatttcctcatcccccacctccccttatccacgaccccactttcccatgagggacctctcttccctgcctcgagtactgaagacccctcctttgggtgtcctccatatttcaatgctgacctccctttctttattttttcttaagatgggtatgttgcccaggctggtctcgaactcctgggctcaagtgaccctcccgcctcagcctcccaaagtgctgggattgcagacatgagtcaccacgctcggccctaccacccttgtctttggaaagtttacatcctcccagttcccacaatcatctccccttctcagctcagcttctcaaaaaagccacgtacagtatttatttcctcctcctcacttccttcctccctttaccccaggcaatctgggctgcattcttgtattcctctgaaactgcccaggtaaattagccatgccctcaaaattgcacaatccagggaatcttttgcatatgcatcttaattttctggaggcatttggcacagctgtattctctcaggataatctctcttcttttgactttgtgactgcatttcctagtggttcttctacttctctgactgtatttttttctttcttctcagattcttcttcctcctgctcccttcaaaaaaggtgttggggataaggagagtgtggctatgtccatttctgttgtccctgcaaaagctcctcaaggccatcacatttctactgcctggatctccttaatgtcctctggatcattcttgctcagaaagtcccaccttggcctctcctggaaccaccccgagtccctaggctggtgcaagtatactccctccatgcatcacagcatttagaaagaaatgtatggaaataagttgtttttctgtttctctccctcactaattgtcagtgcatccagggcagaggtcttggtttatttaattctgtatgccagctcctcacgtggtgcctaccacacagtaagttctcagttcggttactactgaagtactcagttagtactcaatgactttacttgttccaccaaaccaacaggggctgcccgctgatgagaggtgaaatgcgaagggaaagaactcaggattaacccccagggttctggagaattggaaactgaattagtcaaggttctccagagaaacagaaccaacaggatatatagagggatatataaaaggatatgggccaggcgcggtggctcacgcctgtaatcccagcactttgggaggccgaggcgggcggatcatgaggtcaggagatcgagaccatcctggctaacgtggtgaaaccccgtctctactaaaattacaaaaaattagccgggcgtggttgcaggcgcctgtagtcccagctacttgggaggctgaggcaggagaatggactgaacccgggaggcggagcttgcagtgagccaagatcacgccactgcactccagcctgggcgacagagtgagactccgtctcaaaaaaaaaaaaaaaaaaagaggatatgaaagaggggatttattgcaggaattagctcacgtgattctaaaggccaagaagtcccaccgtatgccgtctgcaagctggggaacctggaaagctggtggtgtccttcaccctgagtctgaagatctgagttcctggagctgtgatgtccaagggcaggagaagatgaatggccctgctccagaagagggtgcaaatgtgccttcgccctgcctttttgttctgtctggacccacagtggattggatgatgcctgctcacgtgggtgaaagtggaacttttctgtctactgatttaaatgcttatctcttctgcaaacaccgtcccagtcagacccagaaataatgttttaccagctatctgggcatctcttagcccagacaggttgatacatataattaaccatcagataagccaagtggaaaacataggttacaggcaaaacacagaaggctccagtgccagggtatagaaatgagacttttgggttgggcactgtggcgcagacatgtaatccagcactttggaaggctgaggtgggtggatggcttgagcccaggagtctaagcccagcctgggcaacatggtgaaactccgtgtctatataaaatacaaaattagccggccgcgatggcttacgcctataatcccagcacttagggaggccaaggcatgcagatcacctgaggtcaggagttcaaggccacctggccaagatggtgaaaccccatctctactaaaaatacaaaattagccatgcgtggcggcatgtgcctcccaactactcgggaggttgaagcaggagaatcacttgaacccaggaggcggaggtctcagtgagctgagattgcaccattgcactacagcctgggcaacaagagcaaaactccatctcaaaaagaaaaaaaaaaaattagctagtcatcgtggtgcacgcctgtagttccacctactggggaggctgaggtgggaggatcatttgaactcgggaggtggaggttgcagttagccgagatcgcgtcagcctagcaggctgggagacagaacaagaccttgtcaagacagaaagaaagaaagaaagaaagaaagaaagaaagaaagaaagaaagaaagaaagaaaggaaggaaggaaggaaggaaggaaggaaggaaggaaggaaggaaggaaggaaggaaggaaggaaggaggaaagggagggaagcttttttcaataagggaatttaacctagaccctcatggacacacttagtctttgagggggaaataaggaaaaaggacaaaaatctatcagtagttatataaagtagaaaagaggttgaatgggagggacaggtaaaatgaaaagaaaaagaaaagagtttcaaacaggaagtggatgacagcaaatttgttttgttttgttttgtttttaaagaaaagaggcaaacaaaactgttggaatttgggatactgtcaccctctgggggcatagtgactaagcaaaggcacaggggtcttctgaagagctggccatgtgtgatgtcttgctatgggtgctaggcacacaggcatattcactttgtgagatttcattaacctgcacacttaagtgtgtttctctgtatgtatactacaaaaagttgttttttgtttttttttttgagatggagtttccctcttgttgcccaggctggagtgcaaaggcacagtcttggctcactgcaacctccacctcccaggttctagcgtttctcctgcctcagcctcccgagtagctgggattacaggcacccaccaccacgcctggctaatttttgtgtttttagtagagacggggtttctccatgttggccaggctggtctcaaacgcctgacctcaggtgatccccacctccccccgccccgtctcagcctcccaaagtgctgggattataggtgtgagctaccgcggctgggcttgttccctgtttcaaacagcttggtctctgtctgaggtggggcctggggcacaagaaaaggctcagggtcttgaatgggtcccaggtgctgtctccaggaatgtgtgccttagaaaagagggatgtgtctgtactgcaggatgtgaaggtttaagtttgaatatttctttgatcctagaataaatgagttatacacctcatgcagccttggcgagaaaaggcacagggtccctggcctgcctctgccttgctcagtgaccttggggaaatcatataaccaaactacatttaggtttcctagtatgtaaacttaagacaatttcgtctgccctatccactgcctaggttggtatgaggattaaatgaggtaattgatgtgaacgtgcttcctgcagatgtttttttatagccctttacaaataccatataagaagcctaatctagctgtagaattgagcccacaattggtttttgagccataatatcaaacactcagtctttccctaggtgatatttttccattctctgtttttgataaggtctctagtttgtaaggtcacttggaattcgagtcctttgtgcccagagtgttggctgcaccactaactcacctcctataagttagtacagacactcttcattggtcatgtgctacctggcaggcactgagctagacaccactgacaaaatgatggataagaaacttactgggcaggacacagtggctcatgcctgtaatcccagcactttggaaggctgaggcgggtggttcacctgaggtcgggagtttgagaccagcctgatcaacatggagaaaccccgtctctactaaaaatacaaaattagccaggcgtggtggtgcatgcctgtaatcccagctactcgagaggctgaggcaggagaatcgcttgaactccagagatggaggttgcagtgagccaagatcacaccattgtactacagcctgggcaacaagagcgaaaatctgtcacaaaaaaaaaacaaacaaatgaacaaaaagaaacttactggccaggcgcagtggctcactcctgtaataccagcactttgggaggctgacgcaggcggatcacttgaggtcatgagttcaagaccagtctggccaaaatggtaaaacctcgtctctactaaaaatacaaaaattagccaggcatggtggcgtgcgcctgtagtcccagctacttgagaggctgaggcaggagaattgcttgaacccgggaggtggaggttgcagtgagccaagatcatgccactgcactccagcctgggcaacagagcaagaatccatctaaaaaaaaaaaaaaaagccaaacttactaggtctgcccccagtgaacctgcatgctggtaggtatgggaagacagaagaagggtcgggcacagtgtcttaaaaaagttatttgagacaatgccatcagcaatgccatcagcattggacgatgggagaatagatcatctcacttgcccattcttcaaatggccccaccgaaagcataggttttaaactggccattaaacctgctcgtgactttatcaacctcagccacatttatccggatggaggtgtagtctttgatgctgatgatgcagttgctggtggagcatttcatatacgtccacaaactcactagcattattctgcatgttgaggccacacctgttgccaccacacctcatatgagcagataaagcacttaattattttttgtttatttcttggctgccatctcatgtcgtagaacacaagtccaccgagtaccaggagccccgccaggtgttggttatgcagtgagttatcttctgtcttcccatacctaccagcatccgggctcttatatgcttcctctcggcctcccaaaatgttgggattacaggcatgagccactgtgcctggcctcaaataactgttgactggagagcatattgaatgtggaatacttgtcataaataaatagtgaaaacctaaaaacaataattattattactacgttagtgataaatttaaaaagaacaagaggaacaggctttgatcgaacttggcaggcaacttaggtaagaagataaaggatgaagaaggtgacattattgctgagactcagccaagccaattatgcaaagacctgggagaagaacatttcaggaagtacaatagcaagagcaaaggtcctgaggcaggaaagaacttgccatgtttgaggaattgaaaagcagtcagtgtgactggaatgtggaaagtaggagggagaatgggatgagatgagattacagaaaaggtaatgaaggggccaggaaaagcaagcctcctaaatatgatggggagtcagtaaagggtttgagcaggggtttatgttttgttgttgctgttacagggtctcactctgtcgcccaggctgcagtgcagtggtgtgatcatggcttgccgcagcctcgaactcctgggctcaagcgattctcccacctcggcctccctagtagttgggactgcaggtccgtgccaacacacctggcttaatttttaatttttgtccagatgaagtgtcccggattctgctgagagcaaaatacagaacaacagcaacaacaaaatagaaacaaagaggacgagcatggtggctcacacctgtaatctcaggactttgggaggctgaggcaggcggatcacaagatcaagagatggagaccatcctggccaacatcgtgaaaccccgtctccactaaaaatacaaaaattagctgggtgtagtggcgtgcccttgcagtcccagctacttgggaggctgaggcaggagaatcacttgaacccgggaggcagaggttgcagtgagccgagatcgcgccactgcactccagtctggtgagagagtgagactctgtcccaaaaaaaaaaaaaaaaaaaaaaaaaagacagaaagaaaaagagcaagataaaacaaaacaaaaaattaaaaacttttttttttttttttagataaaaggacatggcatctccctgtgttgcccaggctagtctcaaactccaggactcaagtgattaacctgcctcggcctcccaaagtgctgtgctgagattataggtgtgagccacccaccatgcctgacctatttgggttttgagaagatctctttggctggggagggagaatggattgaaggggccaagtgtaaagcaaatagaacaggaattacaggagttcaggtggaagacagtggtttggcctagggtaagagcagtggaggtggaaataaggagcaaattcaagatatacttttatttttttaaattttttttttttgagacggagtctccctctgccacccaggctggagtgcagtggtgcgatctgggctcactgcaagctctgcctcccgggttcaggccattctcctgcctcagcctcccaagtcgctgggactacaggtgcccgccaccacacccggctaatttttgtatttttagtagagacaaggtttcgccgtgttagtcaggatggtctcaatatcctgacttcgtgatccgcccgcctcggcctcccaaagtgctgggattacaggtgtgagccaccacgcccggccgttttttatttttatttttattttttattttttttgagacggagtctcactctgtagcccaggctggagtgcagtggtgtggtctcggctcactgcaacctccgcctcccgggttcaagtgattctcctgcctcagcttcccaagtagctgggactataggcgcgtgccactacacccggctaattttttatttttagtagagatggggtttctccatgttggccaggctggtcttaaactcctgacctcaggtgatccaccggcctcagcctcccaaagtgctgggattacaggcgtgagcccccacacccagcctcaagatatattttaaagacaggctggacatggtgactcatgcctgtaatcccagcactttgggaggccaaggtgggcagatcacttgaggtcaggagttcgagaccagcctggccaacatggtgaaaccctgtctctactaaaaatacaaaaattagccaggcatggcagcacatgcttaaagtcccagctattcgggaggctgaggcgggtgaatcacttgaatccaggaggcagatgttgcagtgagccgagatcacaacactgcactccagcctgagtgacagaccgagaccctgtctcaaaaaaaaaataataaaaataaaaaaagataatactgacagtgcttgctaataggctatacatggaagatgaaaaaaaagaggaatcaggatagcttcatggtttggagttgggcagccaggtggacgaggggccattttacagaccaggggcatggagggagatgcagttgtgatgggggacagcctaggagacttccatctgtgacaatcccagaggaatcattgggtaggaagttgaatatctgcatccagattcattcacacaggcacagggaggagactgggctagggttatggttatgtacatgggagtcatcaacagtatgtaatatttaaagccaagagattcaaaaggatcatctagggagagcgtgcagatggagagcgctaaaagcgcaggaaggagcccctgagaactccttcagcaaaggagactgggagtaagcggagagaggatagtgcatggagaggacaccggatgctggaggacatcatcttcatcattgacgggaccttcgccaataacacatgccacagaaattagtactcacccagataaagggagtaaagaggaaaatgatggtgcaaaactgcgttcatggccgggtgaggcagctcacacccgccgtctcagcactttgggaggctgaggcagaagggtcgcttgagtccaggaccttgagattagtttgggcaacataggaagaccctgtctccttctcttttttttttttttttaattttttgttttgttttatcttgctctttttattttttaaatttttgttctgtgttttgctctctcagcagaaccagggagagcccatcttaacaaaaatttaaaaattaggccgggtgcagtggctcatgcctataatctcagcactttgggaggccgaagcgggtggatcacttgaggtcaggagttcacgaccaggctggtcaacatggtgagacaccgtctctactaaaaatacaaaaatcagccaggtgtggtggcacacacctttaatcccagctactcgggaggctgaggcaggagaatctcttgaacctggaaggcagaggttgcagtgagccaagatcgtaccactgcaatccagcctggaaaacaaagtgagactctgtccccaaaaaaaaaaaaaaaaaaaaaaaaaaaaggccgggcgcagtggctcacacctgtaatcccagcactttgggaggctgaggcaagtggatcaactgaggtcggaagttcaaaaccagcctgaccagcagggcgaaaccctgtctctactaaaaatacaaaattagctgggcatggtggtacatgcctgtaatcctagatactcggaggctgaggcaggagaatcgcttgaacctgggaggcagagtttgcagtgagccgagattgtgctattgcactccagcctgggtaacaagagcgaaactccatctcaaaaaaactaataatagaataaaattccctagaagcagatctgagataaaggtttgtttgtgagtaatttataaaggaaaggctcccaagagaaactggtaaagggagtgtctttcttgctgccttggatggtcttgaactcctggactcaagagatcctcctgcctcccagagtgctagaattacaggcacgcgctgccatgcctgtcctggtaagggaatttctcacagtaagggaaagtagaataggaaaggagaaggagctaaaaggagggtgatgggccgggtgtggtggctcacatctgtgatcccaacacattgagagaccaaggcaagtggatcacttgagcccaggagttcaaggctgcagtgagccatgattgcaccactgcactccagtccgagtgacggagacaccttgtcttaaaaaagaaaaaaagagagatgggtgattttaggtaaggtctcagccttagcctgatctgcatggagttctggagaataaattgtatctccaagtttgttcctactcaaggcaagggagctgggcctcatatcacagcacttgtcagtcaagacaagtaacacagtaagacagtaagctcctagcctctttgtgtttttaggcagagcagttccagtagcctgaggacaattcttcaaagagaatatagatgtaagcctttggaagcaaaagcccagagaatccagggtggtgacccacagaagtggtcatgggacctttcagcatgtggagggtgcacctggagtgtccactaacactccatgtaggcatttaaaatgtttcttaggggtcaggctcggtgactcatgcctgtaatcccagtactttgggaggccgaggctgatggatcacctgaggtcagcagttcaagaccagcctggccaacatggcaaaactctgtctctactaaaaaataaaaataaaaaaaattagccaggcatgctggtggacgtctataatcccagctactcagaaggctgaggcaggagaatcacttaaacccaagaggtggaggttgcagtgagccaagatcacaccatggagggtggagacgtgtgggaagagacagatggaaagaagactactgaaaaggttaaaaaaaaaagtatgggtgggaagtgaggaattaattctgtggcagtggggacagacaggagagccagactggaaaaaaacccagctataccagcttggaaaagttacttagcctctctgggcatcaaattattcacctgtgaaatgggtcaattacaataatagtgaaaaaataataatagtaaggccgagtgcagtggcccatgcctgtaatctcagcactttaaggccaaggtgggtggatcacctgaggtcaggagttcgagaccagcctggccaacgtggcaaaaccccatctctactaaaaatacaaaaattagctgggtgtggtggcatgcacctgtagtcccagctacttgaaaggctgaggccggagaatcgcttgaatcaaggaggttccactgagctgagatcacgccactgtactccagcctgggcaagagagtgagactcagtctcaaaaaatacaaaatattttttaaaaatgataatggtagtgacatttattgagcactttactgtgatccagctacagactgttccaaagactttgcaactgttatttttgcttaatcctcacaacaacctatgaggtaggcacatttattgcccccatgtgaccaagggagactgaggctcagggaggttaataatttgcctaggcacagtggctcatgcctgtaatcccagcgctttgggagacccaggcaggcagatcacttgagcccaggagttcaagaccaagctgggcaacatagcgagaccctgtcgctacaaaaattacaaaacaaattagccgggtgtggtggtgaatgcttgtagtcttagctacttggggggatgaggattgcttgaacccgggaggttgaggctgcagtgagccatgttcaagccactgcactccagcctggatgacagagtgagaccctgtttcaaagtaaagaaataaataaacaacttgcttgagttcccgcaggtagtcctttccccaaaagattgtaggaaacactaaatggcagccataaataataattattggctgggtgcagtggctcacacctataatccttgcactttgggaggccaaggcaggaggatcccttgagccccagagtttgagaccaccataggaattatagtcctaagatccccatctctattgatctggagctattttcactaagctttgaaatttcccatcaacctcaatctccatcaacacacactaatcctgctgactttgttctcattctcgccgcccttgtactcccctcccctccacactccccttccctccatgaatacctgacttctgccactcctcagccccctctaagctctttctcaaaactaccctctaaggccagcaccgtggctcacccctgtaatcccagcactttgggaggccgaggcaggtggatcacttgagatcaggagttcaagaccagcctggccaatatggtgaaactctgtttctactaaaaatacaaaaattagcagggcatggtggtgcatgcctgtagtcccagctacttgggagactgtggaaggagaatcgcttgagcccgggaggcagaggtttcagtgagccaagattgcgccactgcactccagcctgggcgacagagcaagactccgtctcaggaaaaaaaaaaaaaaaagaaagaaagaaagaaagaaaaaacaccctctactcctttgattcaacaatatcaataatttccccattttattaacagatactatttactgatgccatcaatgttggcagagcgcttacttccagttggggaccgtgctaagcccggtggtacctaaagtccttgctctttaggaggttgcaattaaaatagagttagggacaagtcaacaaatacaaaagagagatcattgcaaattgtgacttaggaatcaaatggagcaggatggcagtgaatacaggtgggtaccatgtttggtgaagcatcagggaaggcctctctaaggaggcaccttggtcctgggaccaagaagaggcaggtgtgcaaagaccttgaaacagagcagagggaagcatgagtcagaaagccctaaggaggaaacgcaaggttcccagcccggtgccatgtgctttacacaaaacttttccttttcctgctagtaaatcccgtcctttccgggagttaatactccctttcaatcttggctcctctctgcttcctgcaggtggggcaccacagtagctgcccagagcctgggagggtcagccataacccagctccgaaggtacaataaccacccttttttgagtgttactatactcaaacatagagcatgagtgttactacactcaaacatagagcacgaaggccttaggccaacaagaagttgtggccagtgggtcaaagcccaagaacagtcttcaatactattaatatttaatttttttgttgaagctcaatttatgcatctggatgaatttctatccctgtatacacccatgagaccaccaccgtgttcaacatatagtgtttccatcactcgagaaattttcctcatgcctcttcccagttagtaccctcctgagaaggtggtcatttttttttttacacttttctccatagttttgtgtttgtttgtttgtttgttttgagacagagtatcactccgtcacccgtgggcagatcacgaggtcaggagttcaagaccagcctggctaacatggtgaaaccccgtctctactaaaaatacaaaaattaactggggctgggtgaggtggctcaggcctgtaatcccagcactttgggaggccaaggtgggtggatcacgaggtcaggagatggagaccatcctggccaacatggtgaaaccccatctctactaaaaaaatacaaaaattagctgggcgtggtggtgcatgcgcctttagtcccagctactcgggagggcgaggcaggagaatcgcttgaacccaggaggcagaggttgcagtgacccaagatcatgccattgcattccagcctgggcaacagacccagattctgtctcaaaaaataaaattaaattaaaaaaagaacaaagacattctcctatgcaacggcagtatcacacacaggaaatttatcattgttaaattagcactggtctctaatattcagtctacattcaaatttctccaattgtcccaataatgtcctttgtagatttttttcttttcttttcttttttttttttttttgagacggactcttgctctgtcgcccaggctggagtgcagtggcgcaatttgggctcactgcaagctccgcctcccgggttcatgccattctcctgcctcaccctcccaagtagctgggactacaggtgtccgccaccatgcccggctaattttttgtatttttagtagagacagggtttcaccgtgttagccaggatggtctcgatctcctgaccttgtgatctgcccacccgggcctcccaaagtgctgggattacaggtgtgagccaccgtgcctggccgatttgttttctttttggtcctgagtccaatcaaagatcgcctgttacatttagttgctatgtctctttaatatcttttaatctgggcagtttccttacctctcttttttttttttttttttttttttttttttttgagacaggatcttgctctgttgccctggttggagttcagtggtgcaattttggctcactgcaacctctgcctcccaggctcaagtgattctcctacctcagcctcccaagtagctgggaccacaagcacacgtgccaccatgcctagctaattttgtgttttttgtagagatgaggttttgccaaattgcccaggctggtctggaactcatgaggtcagcctgcctcagcctctcgaagtgctggggttacaggcatgagccaccatgccaggccacctctttttgatgttgatgtgtctgaaaactccaggtaacttattctgcagaatgtcgttcaatttgggtttgttaatgtttactcatcatgatctagattaaatatttatgacaggaatcaaggatgtgatgtcatatccttcccagtgaatcgtatcaggaaaaattattgttgttttgtttcattattattattttagagacagggtctctctctgtcactcaagctaggttgcagtggcacagtcacaactcactgcaatgtgtatgttgttcgtttgtttctttgtcttatttattcatctttttttttttttttttttggagacagagtctcactctgttgcccaggctggagtgcagtggtgcgatctcagctcactgcaacctccacttcccaggttcaagcgattctcctgcctcagcctcccagtagctgggattacaggtgcgtgccaccatgcccagctaatttttgtatttttactagagatggggttttgccatgttggccagtctggtcttactgacttcaggtgatccgcccacctcaacctaccaaagtgttaggattacaggcgtgagccactgcgcccaggctttatctttatttatttatttttagagatggggtctgactcacccaggctggccttgaactcctgggctcaagcaatcctcctgcctaggcctcccaaagtgctggattacaggaatgagccaccacaccctgctttgtctcattattgatgatgcaaggcaattactttttttattttgataagatatatcattttaacctttttttttttttttttgagactgagtttcactcttgttgccaggctagagtgcagtggcgcgatctcggctcactgcaacctccacctcccaggtttaagcgattctcctgcctcagtctcccgagtagctgggattacaggcacccatcaccatgcccaactaattttttgtattttaagtagaaaccaggtttctccatgttgtacgggctggtcttgaactcctggcctcaggcgatccacctgcctcggcctcccaaagtgctgggactacaggcatgagccaccgtgcccggcccattttaactatttttaaatgtacagttctgtggtgttaagaacattcacattgtgatgcaacaatcaccaccatccatctccagaacacgttcatcttccccagctgaaattctacccatgacacattaactccccatgttctctccccaccagtccctggcaagccccttctactgtctctatgaatttgatgactctaggcacctcatacaagtggaatcatataatatttgtctttttgtaaatggatgatttcacttagcgcaacgtcctcaagcttcatctgtattggagcacgttccttgccttttaaggctgaataatattccactgtatgcatatatcatatttcatcaatgtgtccatcgatggacacttgggttgctgtcaccccttggctatgctgctgtgaatgtgggtgtacgcatatctctgaaagaccttgttttcacttttttggggcatgtacccagaagtggaattgctgactcatatagcagttctatatttagatttttgaggaattgccgtaccattttctgcagcagctgcaccattttatgttcccatcagcaatgcacaaggggttcaatttctccccattcttgccaacacttatttttctattttctataatagctagcctagtgtgtgtgaagtagcatctcattgtggttttgatttgaatttccctaatgattagtaacgatgaccatctccttatgtgcttgttgtccatttctgtatcttcttcttttttttttttttttttttaattttgagacagggtctcactttgtcgcccaggctagagtgcagtggtttgatctcggctcattgcaacctctgcctccagggttcaagagattctcccacctcagcctccctggtagctgggactataggcatgcgccaccatgcccagctaatttttgtatttttagtagagacagggtttcaccatgttgggcaggctggtttcgaactcctgacctcaagtgatctgcccgccttggcctcccagagtgctgggattataggcatgagccaccgtgcccagccatttttctatcttctttaaagaaacactggccaggcacggtggctcacacatgtaatcccagcactttgggaggctgaggcaggcagattgcttgagcccaggaggtttgagactagccttggtaacgcggtgaaacttcttctctatacaaaatacaaaaactagctgggtgtagtgtgtgcctgaagtcccagctactagggaagctgagatgggaggactggttgagtccgggagatagaggctgcagcaagctgtgattgcgccactgtactccagcctgggtgacagagtgaggccttgtctcaaaataaataaataaataaaaataaagaaacatctgttcaaggctttgcttttttttttttttttttttttttgagactggcctggccttgttgtgttgcccaggctggcctcaaactcctgggctcaagcaatcctcagcttcccaagtaggtgggactacaggcgcataccaccatgcctggcttcttttctttgtctacttttgaattggattgtttgtttggttgttgaattgtaggatttctttatatatactggatattaatattttatcaaatacatgttttgcaactattttcttccattctgtgagttgtcttttcactgtcttgtctcttgttgtgtggttttaaaaatttttttaggccggacacggtggttcacacctgtaatcccagaattttgggaggccgaggcgtgcaaatcacaaggtcaggagttcgaaaccagcctggacaacatggtgaaaccccatctactaaaaatacaaaaaattagctgggtgtagtggcgggcacctgtaatcccagctacctgggagactgaggcaggagaattgcttgaacccaggaggcggagcttgcagtgagccgagatcacactgctgcactccagctcgggcgacagagtgagactccgtctcaaaaaaaaaaaatgttttttagagacggagtctctgtcgcccaggctggagtgcagtggtgtgtgatcatggctcactgcagcctggttgaactcctgggctcaagcgatcctcccacctctagttgttttcttttcttttcttttcttttcttttcttttcttttcttttctttccttttcttttcttttcttttcttttcttttttagatgaggtcttgctctgtcacctaggctgaagtgcagtggcatgatcccggctccctgcagccttgacctcctgggctcaagcgatcttcctgccttaccctctggagtagctggcactacagccatgtgctaccatgcctggctaatatatatatatacacacacacatatatatatgtatatatgtatatatatgtatatatgtatatatatgtgtatatatatatgtgtgtatatatatgtatatgtatataatattttttagtttttgtagagatgagggtttgactaggcccatctggaacccctgggctcaagtgatcctcccacctcagcctcccaaagtgctgggattgcaagtgtgagccaccgtgaccagcctcaccctctctctttttttttttttctgagacacagcctcaagaagtcctgagaacatgtgccttctggccccactctcttgatagtgttttttgatgtacaaaactttttaattttgatgaagtccagtttatctatttttctttcgttacctatacttttagagtcctatctatgaaattattgccgaatctaacgtcataaagatttttttctaagtgtttcatagttttaactgttatgtttaggtctttgatccattttgggtaatatttttgtatatggtgttaggtaaggatgcaacttccttcttttgcatgtggatatccagttttcccagcactatttgttgaagaaactgtcttttctacattaaaaggtagtggctcctttgttgaaaatcaattgatcggctctctctctccctctccctctccctctccctctccctctccctctccctcaccccacggtctccctctcatgcggagccgaagctggactgtactgctgccatctcggctcactgcaacctccctgcctgattctcctgcctcagtctgccgaatgcctgcgattgcaggcacgcgccgccacgcctgactggttttggtggagacggggtttcgctgtgttggccgggccggtctccagcccctaaccgcgagtgatctgccaacctcggcctcccgaggtgccgggattgcagacggagtctcgttcactcagtgctcaatggtgcccaggctggagtgcagtggcgtgatctcggctcactacaacctacacctcccagctgcctgccttggcctcccaaagtgccgagattgcagcctctgcccggccgccaccccgtctgggaagtgaggagcgtctctgcctggccgtccatcgtctgggatgtgaggagcccctctgcctggctgcccagtctggaaagtgaggagcgtctccgcccggccgccatcccatctaggaagtgaggagcgcctctgccccgccgccccatctgggatgtgaggagcacctctgcccggccgagaccccgtctgggaggtgaggagcgtctctgcccggccgccccgtctgagaagtgaggagaccctctgcctggcaaccaccccgtctgagaagtgaggagcccctccgcccggcagctgccccgtctgagaagtgaggagcctctccgcccggcagccaccccatctgggaagtgaggagcgtctccgcccggcagccaccccgtccgggagggaggtgggggggggtcagcccccgcccggccagccgccccatccgggagggaggtggggggtcagcacccccgcctggccagccgccccgtccgggagggaggtggggggtcagccccccgcccggccagccgccccgtccgggaggtgaggggcgcctcggcccggccgcccctactgggaagtgaggagcccctcagcccggccaccaccccatctgggaagtgaggagcgtctccgcccggcagccaccccgtccgggagggagatgggggggtcagccccccgcccggccagccgccccctccgggagggaggtggggggggtcagcccccctgcccggccagccgccccgtccgggaggtgaggggcgcctctgcccggccgcccctactgggaagtgagtagcccctctgcccggccaccaccccgtctgggaggtgtgcccaacagctcattgagaacgggccaggatgacaatggcggctttgtggaatagaaaggcgggaaaggtggggaaaagattgagaaatcggatggttgccgtgtctgtgtagaaagaagtagacatgggagacttttcattttgttctgcactaagaaaaattcctctgccttgggatcctgttgatctgtgaccttacccccaaccctgtgctctctgaaacatgtgctgtgtccactcagggttaaatggattaagggcggtgcaagatgtgctttgttaaacagatgcttgaaggcagcaggcttgttaagagtcatcaccaatccctaatctcaagtaatcagggacacaaacactgcggaaggcctcagggtcctctgcctaggaaaaccagagacctttgttcacttgtttatctgctgaccttccctccactattgtcccatgaccctgccaaatccccctctgtgagaaacacccaagaattatcaataaaaaaataaattaaaaaaaaaaaaaagaaaaaaaaagaaaatcaattgatcataaatacaagggtttattttggggctctctattgtcttctgttggtctctatgtctgtccttatgccagtatcacactgctttcattactgtggctttgtagtaagttgtgaaatcaggaggtatgggtccttcaactttgctcttctttttcaatgttgttttgactatttgaggaatgcaggtactttttaaataggactcctagaggtaccaaggaaaggatgatctataacagctgccgcttacatactttaggaagaatgttgcggctgtgtttggcccatctcatgggtctggtgaccctactgtcttgtctgtactaagaagtatgaatagaatgcatggtctgataaaggtaaaagcattacgttacatagttatatgctatacatatttaactattaaaacatacaaaataggccaggtgtggtggttcatgcctgtaatcctagcatcttgggaggctaaggtgggaggatcacttgaggtcaggagttcgagaccagcctggccaacatggcaaaaccccatctctactaaaaatacaaaaattgtccaggcgtggtggcgcttgcctgtaatcccagctactggggaggttgaggcaggagaattgcttgaacccgggaggcggaggttgcagtgagccgagatgacaccactgcactccagcctgggcaacagagcaagactctgtcttggaagaaaaaaaagagagagagaagaagaaaaaaccctacaaaatagcatggaatcagagatctgagatatctggtctctgtacgcacacataacttcagtttatctgaacacttctgcttgtttctgttctctgctctcctgacccacctcctaccttcgttttcctgcattcagatgctacatgcaagtcatttttatctatttttttcccctgcagaccatttttaaaactctgtgctgtaattgtactgattaaaatcaagggggccaggtgtgatggctcatgcctataattctaacactttgagaggccaaggtgggcggatcacctgaggtcaggagttcgagaccagccagaccagccagaccagcatggagaaaccccatctctactaaaaatacaaaattagctcggcgtggtggcaggcgcctgtaatcccagctgctctggaggctgaggcaggagaatcacttgaacccgggaggtggaggttgcagtgagctgagattgcgccattgctctccagcctgggcgacaagagtgaaactccgtctcaaaaacaaacaaacaaacaaacaaacaaaaaacataaggaatacattcacctggttccaaattcaaaggtaaaaaggcccaggatgaaagtttccgtagcatccctgcctccttcctgccaatttcccctctctggcaacaaccattcttactgctttcttgtattttcttctaaatacatatatttatacgtgtacattcttgagctggatgcagttcaataatgaattctagcaactcagaaggctgaggagggaggacgacttgagcccaggggttcaaggctgcagtgcaggagttcacaccactgcattccagcctaagtgacagagcgagaccccagctctaaaaacaaaacaaaacaaaaatattctgttgcatagccaagtaaaaagaacttcctgacacagcaatagggcagcgcatgctgtggctgctctcccggcacctttgcagtgtgctcctacagattttctcctgccggcaggtatgcacctgcccctgccccagagggattgatgggaactaggaagaccctcagcagccttgtggcaggcagtgagtgggggtgggggttgagattactcccattctggagtgcctgcatccaagctctcaggaggtggcatcttaacaccctgctcccctgcccacccctctggcgaaataactctgggaagccaattctatgctggtgcccaacgcatctccaccagattcagcttcagttgctttcagtagttatttattggatcacccacctgttattggccgccttcccttccctgtctcacttccccattcctttcctgctgtttagccagctcacttcccaaattaagtacttgctctcgaatctttgtctgagtttgctttgagagaaacccaaaggaaggcccatgtatgcactgttctataccttgcttggttcacttaacatgacttggagatactcccctatccctacaccaaggcttcctcattctgttttttttttttttttcttttgagacagggtcccgctttatcacccaggctggagtgcagttgcacaatcagggctcactgcagcctcaacctcccaggttcaagcgatcctccttcctcagcctcctgagtagctgggaccataggcacgtgccaccatgcccaactaatttctacattttttgtagagatggagtttcaccaagttgcctaggctggactcaaactcctgagctcaagtgatccacctgccttggcctccgaagtgctgggattacagacataagcctcattctttttaagggcagcacaatatccccttctgtggacgtgcgtaagaactgggctccggagccagatggcctgcaagtcattcttcatatctaacacgggaccagccatccttccgcagagggcggcctgctttccctccaccttttttactttcatcattgccccgggcacctcttcctgaaatctgggaggcttgcctaactcgttcccatactcttgcacatagtatgtaaattaccacatctacagactggcactcccagttgcgtctgtcttacctagagtttatttgtcctttgctcttttttcccttccctccctccttccttcctattatctgcccactaccctgatcctgggttagaagaacaaaagtttgagaattctcttttcagttttttaatttctcaaagttaaacataattttaaacattggctgttaggattaaaaagttaggagatttcacattggaatctggattttatgcgtctcttgaaaaatcaatgctgtttcatgatagtctcaataaaaaaaagaaaaaaaattaggctgggtgcgctggctcatgcctgtaatccctgcactttgggaggccaaggcgggcaggtcacctgaggtcggatcacctgaggtcaggagtttgagaccagcctgaccaacatggtgaaaccccaattgtactaaaaatacaaaaaattagccgggcgtggtgtcgcgtgcctgtaatcccagctattcaggaggctgagccaggagaatcgcttgaacctgggaggcagaggtttcagtgagccgaggtctcaccactgcacttcagcctgggcaacaggagtgaaactccatcagaaaaaaatcataagtcccagcaatgcctctgttctggcgtgaccacagtcacaatctcctgggccagagctaaggatcccctgtccccttggggtgggggcatctctcaaccattcaccactccccacaaagaggcctcctcacttatttatgggacctccctagcccagtaggtgactggatgtgaaacgcctggttcaggtccttattaatgcaaacttgaagtatttatttaattatttttttgagacagagtcttgctctgtcgcccaggctggagtgcagtggtatgatattggctcactacagcctctgcatgccgggttcaagcaattctcctgcctcagcctcccaagtagctgggattacaggcgcctgccaacacacccagctaatttttttttttttttttttttgagacagagactcactctgtcatccaggctggagtgcagtggcacgatcttggctcactgcaacctccacctcctgggttcaaatgattcttgtgcctcagcctcccgagtagctgggactacaggcgctcgccaccatgcccagctgattttgttttgtatttttagtagaaatgggatttcaccatgttggccaggctggtcttgaattcctgacctcaagtgatccgcctgcctcggcctcccaaagtgctgggattacaggcgtgagccactgtgcctggcctaatttttgtatttttaatagagacaaggtttctccatgttggccaggatggtcttaaactcctgacctcaggtgatcctcccaccttgacctcccaaagtgctgggattacaggtgtgagccaccaagcccggccaagcttgaagtatttctattacttaaagtgaaaatgcagatcctaatttcggcactttgggaggctgaggcaggaggatcacttgggccaggaagttcaagactacagtgagctatggtggcaccactgtgctccaggctgggccacagagcaagaccctatctattttttttttttttttgagatggaatttcgctcttgttgcccaggctggagtgcaatggcacgatcttggctcactgcaacctccacctcccaggttcaagcgattctcctgcctcagcctcccaaatagctgggattacaggcacgtaccaccacacctggctgaccctatctcttaaaaacaacaacagcaacatcatcaacaacaatacccagattccgattcagtagatctcggtggggcatgagattccgcatttctcacaagtttccaggtgatgctggtgttgctggtctacagaccacaccttgaggagcagggacaagccagtctccttcctcccccatcgattttgcacatcactggggatttatttttctagtacattatgtttctagaattccagtggttgttgaatatccatggcagttactgtttactgtttgttttttttttaaagcacaggatctttcggcttcccaaacagtgttactgctcagatccctgtgcacagtgtacaagtcagatctaataggtgctaactgaagtcaaagagaaggccctggaaaatatcactctgaaatccacctccccactccctgatccccaggtccctgtgtccaaaccacaggaatttgaaactgtggaactcagctaaaaatcagagatcttattctggtattccaaggacttaggagttaagtaacttgcccaagattacacagctgcaaaaccccggatctcccaaaccctttgcatttttgtcctaaggccacagtcacagcatttcctaccaaagcccagcccagatccacccactttctgatttttcttgccttattcacacctgagaataaacacctctctgccagttaaaactgtattttcaaacagggttaggctctgtggctcacacctgcaaccccagcacttttggaggctgaaagagttcaagaccggcttgggcaacaaatcaagacccctgtctcttaaaaaataaaaaaattgggccgagcgcagtcgttcacgcctgtaatcccaacacgttgggaggccgaggcgcgtggatcacctgagatcaggagtttgagaccagcctggtcaacgtggagacaccccatctccactaaaaatacaaaaattagccaggcatggtggcacatacctgtaatcccagctactcgggaggctgaggcaggagaatcacttgagcctggaaggtggaggctacaatgagctgagatcacaccactgcactccagcctgggtgatagagtgagactttgtctcaaaaaagaaaaagaaaaagaaaaataattagctgaacacggtggtgtgtgtctgtagtcccagctattcaggaggctgaggcaggaggctgtagtaagctatgatcatgccactgcactcctgcctgggtgacagagaaagactctgtctcaaaataaataaacaaaaaacaaacaaaacagggtttataagtagtaagaaaaggcagttggtgtcttttccccctcttctgtcctccagttgtctccaaaatggtgcatttatcttagacaaggtgacaggtggggggcagggaacggaggggtggcacaaaatggtgcatttggtaaaacactgaagacaagcttactccaggataaaactggcaaaaggttgaagaccaggttactccaagataaagttctacctccttcaccgcctggtctccaggtctgcatctcctggtcacagtctctgcaaggtaagcttttaccttatctctctgcctgttccagggaagcctccttcctgccaagttggtgttcaccttcacctgaattcacccttgttttcctgcctaccatggggccatgggggcccttgttcactccatctcctatatgctgagaatgcccttgtttaatgaggcttttttttttttttgagacagggtctcactctgttgcccaggctggagtgcagtggcactatcttggcttactgcaaactctgcctcccaggctcaagtgattctcctgcctcagcctcctgagtacctgggattacaggtgtgtgccaccacacccagctaatttttgtatttttggtggagatggggttttaccatgttggccaggctggtctggaactcctgacctcaggtggtccacctgcctcagcctcccaaagtgctgggattgcaggtgtgagccaccttgcccagctagtttaaaatttttattttatttagagataggatcttactctgttgcccaggctggagtgcagtggcataatcatagctcactgtaaccttgaactcctgggttcaagcaatcctcccatgtcagcctccccagcaggcaggactatggcatgcagcaccatacctggctaatttttgtatttttgcagaatcaggggtctcactatatgtccaggctagtcttgaactcctggcctcaagtgattctcctgccttagcctgtcagggatctgggattacaggcatgagccatgcccggccatatttaatgggttttgttctgtttttttaagatgggatcttgctctgttacccagactggagcacagtggtgagatcatggctcactgcagccttgacctcctgggctcaagcagtcctcctgcctcagcctcccaagtagctaggaccacaggcatgcaccatcacttccagatttttttttacttttctaagagatggtgggggcagggagtggggaggtctctccatgttgcccagactggtctcaaacttctggccttaagtgatcctcctgcctcagcttcccaaagtgttggaattacagtctaagctactgtacccagccaagatatttaaagtgacaaagagattttttttgttgttgttgtttttgttttttgttttttttattgagacagagtctcactctgttgccaggctggagtgcagtggtgtgatctcagctcactcactgcaacctccgatttctgggttcaagcgattctcctgcctcagcctcccgagtagctgggattacaggcacacaccaccacacccggataatttttgtatttttattagagacagggtttcaccatgttggccaggatggtcttgatctgacctcatgatccacctgcctcagcctcccaagatgctgggattacaggcgtgagtcaccgtgcccgacgatagtctttaatggatgtaagtgggggtattttggaaattaacagctcttttcccatgtctttttgaggttgtggctcatcagagacaaaaaaaagcatctttttttaggtttgtttttttttttttttgccacctgtccttgttggtccaatccctacaagagaagggaaatgaggaactcttcttaagctttggactctgtatggtagactttacatgtgaaaaattagataaagtgaacaattacatggaaaaatatcattaccaaaattgttcaagaagaaacatagtaggccggctgtggtggctcacacctgtaatctcagcactgggaggctgaggtgggtggatcacctgaggtcgggagttcgagaacagcctggccaacatggtcaaacccgtctctactaaaaatacaaaaattagctggacatggtggcaggcgcctataatcccagctactcaggaggctgaggcacgagaatcgcttgaacccgggagacagaggaatagaatagacttacatataagtaaaattgaatctgaataaaaaattctagtgagaaagaaaattataaccacaaaacacttcaccaagcccagatgtcctcacaggcaacttttataactttaaggaacagaaaacctccatcttacccaaactaagaaacaaaattcaacaacccatgtgaatctagtcactagctactgtaagggaaatctcacacctagccaaaaacattaaaaaaaaaaaagtaagaaaaggaaaccaatagttcagtttcacctacatagatgcaaaaattatgaataaaacattagctagccaaatacaactatgtgtaaaacaaacattaccaatcagtatttatcccaggaaggcaaggacgttattttaccattagaaagtagcaacatagtgtaatcccagctattcgggaggctgaggcagagaattgcttaaactctggaggaggaggttgcagcagtgagctgagatcgcaccactgcaccccagcctggacaacagagtgagagtacgtctcaaaaataaaataaaataaaataaagtaagtagcaatacagctgggcttggtgctttgggcctgtaatcccagctactccggaggctgaggcaggagaatctcttgaacccaggaggcggaggttgcagtgagccaagatcacctcactgagctgtctagcctgggtgacagagtgaggttccgtctcaaaaaaaagaaaaaaaaaaaaaatagaagccgggcagggtggctcatacctgtaatcccagcactttgggaggctgaggtggtcagatcacctgaggtcacaggtttgagaccagcctgaccaacatgtgaaacctgatctctactaaaaatacaaaattagtcgggcgtggtggcacatgcctgtaatctcagctatttgggaggctgaggcaggagaattgcttcaacctgggaggtggaggttgcggtgagccgagatcgcgccaccgcactgcagcctgggcaacaagagggaaactccgtctcaaaaaaaaaaaaaaaaaaagcaaaataaacgcactgcagcctgggcaacaagagggaaactccgtctcaaaaaaaaaaaaagaaaaataaaaaaataaataaaatgtaaatccttttgtacattttcatggaaaaccataaataatatgagaagaaaagctacaaattaagagatatttgtaatgtatataactgagaaagaattgatatccaaaacttttcttttattattattattattatttttcaaaatatttttaaaacctacaaataggcccagcgtggtggctcacacctgtaatcccagcactttgggaggcggaggcaggcagatcacttgaggtcaggaattccagaccagcctggccaatatggtgaaacaccatctctactaaaaatacaaaaattagcagggcgtgatgatgggcacctgtagtcccagctacttgggaagctgaggcaggagaatcgcttgaacccaggaggcagaggttgcagtgagctgagatcatgccactgcactccagcctgggcaacagagactccgtcttaaaaaaaaaaaaaaaaaaaccccagaaccccccccataaaaaaaaaaaaaaccactacaaataatgagaaaaggacaaaccatccaaaaggaaaatgaacaaaggaatgatttctatgaccaataaacatatgaaacatataaacagacaaaaagaaactcgatctctgcagtaattagggaaatgtatattaaaacacaaagataccatcttacatccttcagatcggcaaatattagcaagcctgcctatttaatcaaaaatgcattaggcagctgggcacggtggctcatgcccataatcccagcactttgggataccaaggtgggaggggaggactacttgagctcagaagtttgagatcagcctggacaacatattaaaaccttgtctctactagaaataatttttttttttttgagacggagcctctctctctcccaggctggggtgcagtggcacgatctcagctcactacaaccttagcctcctgggttcaagcgattctcctgcctcagcctcccaggtagctgagattacaggcgtgcgctgccatgcctggccaatttttttgtattttaatagagagggtttcactgtgtttcccaggctggtctctaactcctgagctcaggcacgccacacgcctcggcctcccaaagtgctgggattataggcgtaagccaccgcactgggcagaaataaaaatttttaaaaattagccgggtgtgatggtgggcacctacagtcccaggtattcaggaggctgaggcaggaggattgcttgagcctgggagatcaaggctgtactgagccgagatcacacccctgcactccagcctgggcaacaaagtgagaccctgtctccaaaaaaaaaaaaaaaaaaaaaaaagaaagaaaagaaatgcattaggctacaagcagtagaagatctaactaaatgactcagacaaataggaagttctttttctcacataacaagtctgtggccaggcgccgtcgtgtgagcttgtggtcccagctactgaggaggtgggtgggagaatcacctaaactcgggaaggttttagctgcagtgagctgtgatcgtgccactgcactccagcctgggcaacagagtgagaccctatctcaaacacacaaacaaacaagaattctggaggtaagtgacgtgagcatcggttcaattgctcagccacacgttgttgaggtagctgatgtgctccctgacatctcacccattttaaagccataatcagagaagagcaagactaaggcatcagcatgctttgtcagaaaagcaaaagctttaaatggcttccagccaacttttgctatacaaaatacttcaaacatccagaaaagaaccgaaaatgatataactcccacatgtgtacctatgatcgattctgaacaaacactgatgttttgccaattgtgcttctattttttttccttaataaaacacgagagacacagtgtccaggattgcattatgtggccaccccagatgaaggggagatgagaatgtgagtgttccgttttctaatatgtataatacaggtaggctgggcagaaagagttagacaggtattgggttagccagcctacagtgtctaacacaccaacaaaatcaagcattggagagcatttggatatggaagagtgctgagaaggtgtggtggctcatgcctataatcctagtactttgggaggctgaggcaggaggatcacttaagtccaggagtttgagagcagcctgggcaacaaagtgagaccttgtctctacaaaaaataaacaaaattagctggtggtggcacctgcctgttgtcccagctactcagggggctgaggtgggaggatggcttgagcctgggagattgaagcttcagttagccatgatcatgccactgcgctccagcctgggtgacagagagagatcctgcctcaaaaaaaaaataaaaataaaaaagaggggccgggtgtggtggctcaggcctgtaatcttagcactctttgggaggctgagactggaggatcctttgagcccaggggtttgagaccagcctgggcaacatagggagaacttgtctctatttaaaaaaaaaaatgctcatacgtggttggcaggagtgtaaatagcctcaaccaatttggaaagcaatttgccaatactagttaatataacgatctagatagtgggcaacccggattagccttttccagatatttgcagctgggaagctctcatacatgttcacagagatacctgcaaatgttcatttcagctttttttttttcaatggcaaaaaactggaaatagcctatttgtccctcaataagagaactaataaatacatctcacaatatacaatcaaaggaatactatgcagctattaaaatgagtgaacttatcaacatgcataaacctttaagacataatgctggttaaagaggcaagttgcagaaaggtacataaggtatgggactatttatgtaaaatcaaatgcacacagagtgacactgtctttattgattcttgcatttgtaataaaggtgcaaactggggaagaaacacactaacatcatagcagcagcaatctccagggaaggaaagagacctgtgaggaaaggtgacgatgagaggaagaaactatacctctaatgttgcattaaggaaagaaaggctaggcccagtggcttccgcctgtaatcccagcactttgggaggccaaggtgggtggatcacttgaggccaggagttcatgaccagcctggccaacatggtgaaaccccatctgtactaaaaatacaaacaatttgccgggcatgatggacatacctgtggtcccagctactcgggaggctgaggcatgagaatctcttgaacctgggaggcggaggttgcagtgagctgagattgcaccactgccctccagcctgggtgacagagtgagactctgcctctaaaggaaggagagaagaaaatagatctgaagcaaatttatcaaaatgctaacttttgctgtatctgtgttgtaggttcctaagcatttgccataatgttctcattatttctttggctatttataatacttcataaattaaaaataaaggaaggagatgtggtattttttctgaagcagcacttctcaaactttcatgtacaatgtatcccctggggatcttgttaaaatgcagttgctgagtcagtggcctgggatggggccggagaatctacacgcctcacaagctcctgtgttgggatgaagctggttccagggccccacttaaagaagcagccttccagagaactctgccccagggctcctgagatggaagtgaaggccccagcccagaggaccctgcgtgaaggttcagtgttggagcctgcagatgctgacagtgcctgcagctttcctgcctattttaggacttgctagaagcttggcatgtcctaaaaaccctttttcaagagtctctccccagctgctgctagcgggattttttttttaactctctatcctatttaacctcctcactgatgaccttttaatgcgtaacttttttttttttttttttttttgagacggagtctcgctctcccaggctggagtgcagtggtgtgatctcggctcactgcaacctgtgcctcccaggttcaagcgatctcctgcctcagcctccccagtacctaggattacaggtgcgcgcctccagcatagctaatgtttgtatttttagtagagacggggtttcaccatgttggccaggctggttatgcataactttttatcacagatgtttgatctcagttttaatcttttcaacatttgtaaacccttggttcattgtgcttctccctttattactcttttttttttttttttttttttttttttgagacggagtttcgctcttgttgcccaggctggagtgcagtggcgcactctcggttcactgcaatctccacctcataggttcaagcgattctcctgcctcagcctcctgagtagctgggattacaggcacacgccaccatgcctggctaatttttctttttcttttttgtatttttagtagagatggggtttcactatgttggccagactggtcttgaactcctgacctcgtgatctgcccacctcagactcccaaagtgctgggattacaggtgtgagccaccgtgcctggcctaattttgtatttttagtagagacggggtttctccatgttggtcaggctggtctcgaactcctgacctcaggtgatctgctcgtcttggcctcccaaagtgttgggattataggcataagccaccacaaccgacctgactgctcatttttaaactcttgatctgacactgggggactttaagctataatcttgttctgttttttttctttttctcttgccttctatgctttccattttattgctttatttatttattgagacagggtctcactctggagtgctggagtatggtggcatgatcagggctcactgcagccctgacctccagggctcaggggatcctcccacctcaccctcccaagtagctggtactacaggcacataccaccatgcccagctaattttctaattttctgtagagatgaggtctcactgcattgcccaggctggtctcgaactcctgagctcaagtgatcctcctgccttggcctcccaaagtgctgggattacaggcatgagccacagcacccagcttccctttttctctcaggacttattttcacattggctggggtgtgggtgggccgccgccattttatattcccagcttccttctggctccccaggaatcctcagctggggtgaggatgacactgaacgaatctcacattccccaggagactgggaaaaacaactgcttcagttctctgtcggatcacaggctctagcttgcatattcgatttgctggggcagtgttgatgtctcctaccctgcaggcccatgtaagaagatgcatgtcatgaattccatgcactctttggattgggaggcaacaaacactgatgagaatcaggaggggctgaagaggagccaggggatctagggtcacccagacatctctgggaggcagttcactcagggtatggtggtcatatctgggctgctccatggaggcactggcatcaggagcttaaaacagactcctgtgttcccttttgtgctcatcagcaatgtccttggtgcctggaccggtttagtagagaaggagatgttcctgcttttatttctatttttttttaaacaagttttcgctctgttgtccaggctggaatgccgtgacaaagccacggctcactgcacccttgacctcctgggctcaagcgatcctcccacctcagcctcctgagtagctaggactacaggcgcactctgccacacctggctaattaaaaacagttattttgtagagatagagtcttgctatgttgcccaggctggtcttgaactcctgggctcaagtgatattcctgcctcggtctctcacagtgctggggttacaggcatgagccaccatggccagctactcctgccctttaggttttggctcatttctcttccccaggggaaactggggcaggatcatggcagggcctggcatgcaacccttgctggcacagcactgtggtaaggggcatgggctctgaagttcaagtggagagaataccccttatgaactgggtgtccttggccagcacttaacctctttgtgcctcaatggccctctatgaaggataacagtagacctgtcttgtaaggttattgtgaagtaaaacttgtagaatggagcttggcacagagtaagcttcaatcaatgtcagctcttcattacccaaccttggcgctgcatgacgaacacctgtggatggttaaaaactgcactgcaggttacttccctcagagcctctggggtgggacccaggcttccgtatttttttttaagccccttaggtaatttcattgtgtgcacagggctgaaaactgcctgaggctgcagtctctcaagtgctagttcacacagatatttatttatttattttttgagacagagttgcgctcttgtcatccaggctgaagtgcaatggcgcaattttggctcactgcagtctccgcctcccaggttcaagagattcttcttccacagcctgccgaatagctgggattacaggtacgcgccaccatgccgggctaactttgtatttttagtagagacggggtttcaccatgtttcaccatgttgtccaggttgctctcaaaatcccgacctcaggtgatccacctactttggcctcccaaagtgctgggattacaggcatgagccaccatgcccggccacacacagataaatttaaacgttccctacaggtctttgttgggtccttttggaagcaactcctgcccccgtgccccacaaaggagcattttcttgtatgtgtcagaatcatttctcttttcccctaccccactgcaaaccccacccaagttcagaagaaaaataccttcaagaactctgaccagatagaggaaaagtgcattgactcaatctacctccttcctcactcccttcttggaggaggccccttcccaaaagaccttcctggaaaaatcttcctttggtgtctccaaggaactatgctctccagggcacgcaacaacagagtaagaattcatctaccactaaagactgaatatagtatgcagtataaaactatttaaaagggccagacgcggtggctcatgcctgtaatcccagcactttgggaggccgaggcgggtggatcacgaggttaggggttcaagacaagcctggccaagatggcaaaaccccatctctactaaaaatacaaaaattagccgggcatggtggcggacacctgtaatcccagctactcaggaggctgagacagagaattgcttgaacccgggaggcagaggttacgagatcacaccactgtattccagcttgggcgacagagcaagacttcatctcaaaaaaaaaaaaaaaacttatttaaaagaaggcgccaggccagggtcggtggctcacgcctgtaaatcccagcactttgggaggccaaggtggggcagatcacctgaggtcaggagttcgagacgagcctggccaacacggtgaaaccctgtctctactaaaaatataaaaattagccagatgtggtggtgcgtgcctgtaatcccagctactcaggaggctgaggcaggaggatcacttgaacctgggaggcggaggtcgcagtgagccgagatcacgccactgcactccagcctgggtgacacagcaagactccgtctcataaataaataaataaggcaccataacaaaatacagtttatcctaaacatggtttaatagttgggaagttggtcatattatgtctttttcctaaatacatgcagaggtaagagacctaaccctgggagtgtgtttggaggaatgaatgctttaaaatcaatcccagaatcggtaagtgtaatgcacaacagtaactgaatgacagacaaaaaccacatgatcatcttagtcaatgcacaaaaagcttttgaaaaagttcaacacgctttcatgattaaaaaaaaaatgcagcaaactagaaatagaagaaaactaccacaatatgatagccatatatgaaaaccccatagttaaatcatactcaatgatgcaagacaaactttttcctcgaagatcaggaacaagacaagaatgcccactttcaccacttccataccacgtagtcttggaatttctagatagagcaattaggcaaaaaggaagaaaaggaaagaaaagaaaaaagaaaaggaaaaggagggaatagaaagaaaagaagaaagaaagaaaatgcatccaaattggaaaggaagaaggaaaattattattcatagattatatgatcttagaaaaccctaaagattccacaaaaaaccctttggaactactaaacaaatttggcaaagcagcaggacacaaaagcaatacatgaaaatcagttgtgttactatatactaacaaagaacaatctgaaaatgaaattaagaaaataattctatttataatagcataaaaagaatacagctgggtgcggtgtctcacgcctgtaatcccagcattttgggaggctgaggcaggcagatcacatgaggttgggagttcgaggccagcctgaccaacatggagaaaccccttctctactaaaaatacagaattagctgggcatggtggtacatgcctgtaatcccagttactcgggaggctgaagcaggagaatcgcttgaaccccataggtggaggttgtggtaagctgagatcgtgccattgcactccagcctgggcaacaagagcgaaactccatctctaaaaaaaaaaaaaggaataaaatagtcattgaaagacttgtgcaatgaaaaccacaaaacattgctgaaagcaattttaaaagacataaataaatggaaagataccctatgtttatggattgaaagacttcatattgttaagatgtcaaaactatccaaagtgatctatagatttcacgtagtctttatcaaaaatcccaatgacattctttgcaaaaatagaaaaatccaccctgaaagtcatgtggagtattctttcaagaatttttttatgttggcattgagtattgaaatcagctctacaataattgtgacttttgaccttttgactttggttgtgtgctccaacccactctataccttgacttccccatttctcagattcatattttgcttcctctttcagccagttggtatatatctcttttttttttttgagacagaatcttgctctgtcgcccaggctggagtgcagtggtgccatctcggctgactgcaacctccgcctcccaggttcaagcaatcaagcaattctcctgcttcagcctctcaagtagctgggactacaggcatgtgcctccacacccggataattttttttttttttttgagacagagtcacccaggctggggcgcaatggcacaatctcggctcactgcaacctctgcctcccgggttcaagcgattctcctgcctcagcctcccgagtagctgggactgcaggcgcctgcatccacacctggctaatttttgtatttttagtagagacggggtttcatcatgttggccaggctgatttcaaattcctgacctcaagtgatctgcctgcctcgtcctcccaaagtgttgggattacaggcgtgagcctgtaaagcactttttgcaggcagatgttaaacaaataactatatgtatataactacaatatacaactatagtaatataattttaaaaaaatttttgagtcatggctcactgctgcctcaacctcctggggtcaagagttcctcccacctctcagccttccaatagtatatatatatttgctgggtgtggtagctcatccgtataatttcagtactttgggaggccgaggcaggaagactgcttatcctagctacttgggaggctgaggcagcgcaaggatcccttaagctcaggagttcaaggttgcggtgagctggaatcacaccactgcacagcggactgggtgacagagcaagaccctgtctccaaaacacacacacacacacaactattttaagccattgcacatcagcctgggcaacatagtgagatcctgtctctaaaaaataaaaaataaaaaaataaaaatagtatttcaagtttaatttttgaatgggtaatacaaataaaaaacaaaaataaaaataaattaaaaataaaaatatacagtatttcgagtttaatctttgaatgggtaatacttttgtttttttgagaaagagtcttgctctgtcgcccaggctggcgtgcagtggtgcaatctccgctcctgcaacctccgcctcctgggttcaagtaattctcatgcctcagtctcctgagtagctgggactgcaggcgcacaccaccatgcgcagctaattttttataatttttatagagacaaggttttgccacattggtcaggctggtctcctgagctcaggcaatccacccggcttggcctcccagagtgttgggattacaggcggagccactgcacccggaccaaatgggtaatccttttacatggttcaaaagccacatcaaaatatatgaagaattagccttcttcccagccttgtctcccatctttccaacaaccattaaccacaattcttagtttcttatgtttcacttcctttctttatgaataaacaagctagtattaatacagattcttgctttctcccgattttaactcttacagtagcatgatgtacagactgttctgcatgcttcttctcacgtaacagtatgtatcttgggaatctttccatatttttaccttaaaaatttccatgtttaaaaaaaaggtgcataatttttgtttgtttgtttgttttttggagacagagttactctgtctcccagctggagtgcagtggtgcgatctcagctgactgcaacctccacctcctgggttcaagcaattctcctgcctcagcctcctgagtagctgggattataggcgcacaccactacacctggctaatttttgtatttttagtaaagacggggtttcaccatattgccggggctggtctcaaactcctgacctcgagtgatccacctgcctcagccttgcatagtattttactacaagctagatatgatagacttttttttttagcccttgaatatctgagaatgttcttttgcccttacacatgaaatataaactgggtataaaatccttgagtcgcaatattttaccccataaaactcttgtagaggttggtattaaggccagcttacatatatttctttcttgtttttcccatcatttctacatggatcctatcttttttcctctcacagtttagatactttgctgaatggtctttatgtttgtttgcttgtttgtttgagacggagtcttgctctgtcacccaagctggaatgtagtgatgccatctcagcaacctccgcctcccaggttcaagcaattctactgcctcagcctcccgagtagctgagatcagaggcaagtgcacccacacccagctaatttttgtatttttagtagagatggggtttcaccatgttggccaggctggtctcagactcctgacctcaagtgatccacccgccttggtgaatcatgtttaaatgtagatcttctcactaatttcattcagcagacagtaaactctttgatctgcatatttctttatctcaggataattttattctcttatagtttcaattattaggcttaatcctttttgttctgatttcgcctgagaaacactgattatatgaatgctagcatatcagctagggatttcagggaacatgaattgtctgaaattcatgttttagaaaactcagacaccagtgacttaaaataggtgtttattttgctcacataatgaaatgtctagggataggcagttgagggtcgtggttcagtggaataaggatgttggagcccaaaccccccagtgccctcggctttttcatcatcgtcaaaatttggcctctctaacaccagcctcacctctaacaaaaccaaaataatgtcaagaaaagaaaagggagaaaggatatttccactgtgtctctgacccagctttgtgttctctgcctgctatgatcctcttcgtctgttactctgttcttttttgtcacattccaggcaagcttttttaaaggtcatcctccaaaatggattttaatgctattcttgaattttagttttcctgcaatcctttttgatatcatccaactttcctctaacttatcctgctgtcctttcatctcagtcatctctccatgtgtgacgttcggcttgcttttaaaaggactcagagtttttccttgtctaccaagtgtgttgtaatactttttggaatgcctgctcaatccgttatccttcccccttctctaagaataagctccctgggcttgggaaagattttattttatttttatttttatttatttattttttattttttttgagacagagtctcactctgtcacccaagctggagtgcaatggcatgatcttggctcactcctgagctgggattacaggtgcccaccaccacgcccagctaatttttgtatgtttttattatttttatttatttatttgttttataattttgtttttttttttgagactgagtcttgctctgttgcccaggctggagtgcagtggcacaatctcggctcactgccgagctgggattacaggcgcccaccaccacgcccagctaatttttgtattctcattttttattatttatatttatttttatttatttatttatttatttatttatttatttatttatttatgacagagtctcactctgtcgcccaggctggagtgcagtggtgcgatcttggttcactgcaacctccacctcccaggttcaagcgattctcctgcctcagcctcccaagtagctgggactacaggtgcccgccaccacgcccagctaatttttgtatttttagtagagacagggtttcaccatactggccaggctgttctcgaattcctgaccttgtgatctgcttgccttggcctcccaaagtgctggggttacagatatgagccaccccaccgggcttatttatttaatttaatttattttatttttttctgagatggagtcttgctctattgcccagactggagtccagtggcatgatcttggctcactgcaacctctgcctcctgggttcaagcaattctcctgcctcagcttcctaagtagctgggattacaggtgcacaccaacacacctggctaatttttgtatttttagtagagacggggtttcaccaggttggccagcctggtcttgaactcctcaagtgatccacccacttcggcctctcaaagtgctgagattacaggcatgagccattgcgcctggccactttcactgatttttgctgaactctggtatctaacatgaatgttggttgatattttcatgtatgttatcaaagaagacaaagtaaaacaagagctatatatttcagaacttcacttgttaatcagaggtaggagaacttctttgctgaaaaaaaaagattatgaacactggaagaacatttcctcaaatgtttgttcatgctattccaatgcaaaggctacagctacagatatgacatacttttatcaacattttcactagtattttttttttttgagacagggtttccagttgcacagactggagtgcagcagtgcgatctcggctaatcccagatgtttgcaaggctgaggcagaaggatcgcttgaacctgggaggcagagagtgcagtgagccgagattactctattgcactccagcctggttgacaagagtgaaactctgtctcaaaaaaaaaaaaaatcaatgaaaacattccgttagaatcaacttgctatatggaattagaaataaatgtatgttttaggctgggcaaggtggctcatgcctgtaatccacgcctgtgggtagatcacttgagcccaggagttccagaccagtgaaaccacatatctacaaaaagaaaaagaaaaaaaaaattagctgggtgtggtggtgcgtgcctggagtcccagctactaggaggctgaggtgggagaatcacttaagcccaggaggtcaagactgcaggccgggcgcggtggctcacgcctgtaatcccagcactttgggaggcccagcactttgggaggccaaggcaggcggatcacctgaagtcaggagtttgagaccagcctgaccaatatggagaaaccccatctctactaaaaacacaaaattagcctggcatggtgctgcatgcctgtaatcccagctactcaggaagctgaggcaggagaattgcttgaacctgggaggcggaggttgtggtgagccgcgatcgcgccattgctcttcagcttgggcaacaagagtaaaactccgtctcaaaaaaaaagactgcagtgaaccgagactgtaccactgcatttcagcctaggcaacagagtgagacattacgtcaaaaaaaaaaaaaaaaggaaaaggaaaaaaggagaaatacatatattttatcatctgtaaattgtataccatatatcccttatatcagaaaaatttataataaacgtgtatattaatatatatgcatttttttttctggaaagttggctgtaaaaacatctgttaaacatcactggatggctacctcacattcccaaataacatgcctctcatttccacgcagattaacgcattgcctttatttgtgtgtgtgtgtgtctgtgtgtgtgtgtgtgttttatttggttttgttttgagacagagcctccttctgtcacccagactgaaatgcagtggtgcaatctcagttcactgctgtcttggcctcctgggctcaagtgatcctcacacctcagcttcctgagtagctgggattttgagatggagtctcctcagtcccccaggccagagtgcagtgacatgatcttggctcactgcaacctctgcctcctgggttcaagtgattctcctgcctcagcctcccaagtagctgagattacaggtggccaccaccatgcccagctaatttttgtatttttagtagagatggggtttcaccatgttggccaggctggtctcgaactcctgacctcaacggatatctgtcagtctccaaaaaaaagtatatatatatatttcaggatctgatcccccttattatctgcatcttatcactgctatccccctactcaagacaccctcttctctcctctggattattgcagtcatctcctggtgggctctgctctgatacccttgccttcttacccaacagcctaagtggtcctttaaaaaagtcagatgacagccaggcatgggggctcgcacctgtaattccagtgcttttggacgttgaggcagaaagattgcttgagccaggagttcaaggctgcaatgagctgtgatcatgccactgcactccagcctgggcaacagagcaagaccctgtctctgctattgttgtgggaagtcagggaccctgaacagagggacctgctgaagctgtgacagaagaacataaattgtgaagatttcatggacatttgttagttctccaaattaatactttcataatttcttaggcctgtctttactgcaatctctgaacataaattgtgaagatttcatggacatttatcacttccccaatcaatactcttaaaatttcctatgcttgtctttactttaatctcctaatcccgtcatcttcgtaaactgaagatgtatgttgcctcaagaccctgtgatggttgcattaactgcacaaattattcgtaaagcatgtgtgtttaaacaatatgaaatttgggcaccttgaagaaagaacaggataacagcgatgttcagggaacaagggagataaccattagctctggctgcctgggagccgggcaggacacagccacatttctcttatttactataaaaaaagtcagttaagacattacaaagtccttcttctgtccaaaaccctctgttatgggctgaattgtgtccccctccaattcagttcatatgttgaagttctaagccccagtacctcaaaatgtaactgtatttggggatagagtcttcaaagaggcaattacgttaaaacgaggtcattagggtggggtctaatgtgtatgacttatgtgtttattagaagaggaaaatggaggccaggtgcagcggcttatgcctgtaatcccggcactttgggaggtcaaggtgggcagatcgctagagcccagcagttcgagaccagcttgggcaacacagcagaaccccgattccataaaaaaatataaaaattagccgggcgtggtggtgtgcacctgtagtcccaccagctatttgggaagctgaggtgggggaatcacttgagtcctggagatcgaggctgcagtgacaaaaaagaagaagccagatgcagtggctcacacctctaatctcagcactttgggaggctgaggcaggtggatcacttcaggtcaggagttcgagaccagcctggccaacatggtgaaaccgcgtgtctactaaaaatacaaaaattagctgggcttggtggtaggtgcctgtaatcccagctactcgagaggctgaggcaggagaattacttgaacccgggaggtggaggttgttgtaagccgagaccatgccactgcactccagccaaagtgagactccacctcaaaaaaaaaaaaaaaaaaaaaaagaggaaaattggacaccacacataaagggaagaccatgtgaagttatagaagaagactgccatctcaacaagccaaggaaagaggcctgaggagaaaccaaccctgctgacaccttggtcttggacttcaagcctccagaatggtgacaaaattagtttctgttgtttaagccatccagtctgggatactttgttatgacagccctagcaatctaatacattcaccaatggctcccaatttcacccagataaaaagccaaagttcttactcaaacttaccaaccctaaacttagcaaacttggtgtccactccttggaaacttgttcagccaactggaaggctggagaattccccctgttaggtggaaactggatcaatagagttagtgttgcaacaagaaacatccaacattggaaagaaaactaaccttaatgatttaataactaaagatctcatctcagaaagtttagccaactctgtctccttccctttgtgatgctctgcccctccatggagatcatgggaacaattcttaagctctttgtagactgggcaaggacacataaatcccctaagtcagaactgggtatcaatggtgggttaagggctgaaatatagaaacatgtgcaattatttgatggtttatggctcatttcaaccaaaagaccattcctagcccatttgcactgttttcattgagatgtcaaaagtgctgaaaggaggctgggaaaactggttggctcctgtctggggcaggcagctgatagaggaaattagctggttcctataattggcactgtagctcccaatgaagagagggcagacagatttaaatgagctgtttttgggaggaggtggggaaggaaaggagagatgatttgggtggagagcatacatgaagatgtaggggaggctggacgcagtggctcacaactgtaatgccagcactttgggaggccaaggcaggcagatcacctgaggtcaggagtttgagaccagcctggccaacatggtgaaacctcgtgtctactaaaaatacaaaaaaatcggaccagcctggccaacatggtgaaaccctgtctctgctaaaaattagctgggtatggtggttcacacctataatttcagctactcgggaagctgaggcaggataatcagttggatctgggaggtggaagttgtggtgagccgagatcacatcactgcactccagcctggatgatagagtgagactccatctcaaaaaaaaaaaaaaaaaaaaaagatgtagtggatgttgttggtgccatccagatcctgttcatctgctgtctcagtcagctcaagctaccaaaaagtaccactagctttggcttaaacaacagaaatgtgttttctcatagctctggtggctagaagtccaagatcaaggcacgtgcaggatgggtttcttctgagtctctctctttggcttgcagatggccatagtctctctgtgtcctcaaatggtctttcttctgtgcatatgtattcctggtgtctctctgtgtgtcctaattcctcttcttataaggatatcagtcagactggattaggggccaacctaacagcctcattttaagttaattacctctttaaaggcgctgtcggccgggcgcggtggctcatgcctgtaatcccagcactttgggaggccgaggtgggtgtatcacgaggtcaggagatcgagaccatcctggctaacatgatgaaaccccgtctctactaaaaatacaaaaaattagctgggcgtgatggcgagcatctgtagccccagctactccggaggctgaggcaggagaatggcctgaacccgggaagtggagcttgcggtgagccgacatcgcgccactgcactccagcctgggcgacagagagagactccgtctcaaaaacaaaacaaaacaaacaacaacaaaaaaaaggctctgtctccaaatagagtcacattctgaggtactggaggttagggtttccacatatgacattttggaggacacaattaagctcatacagctgcctggtgcatctttcccccagctgcagggagtgatggttgataatgactcacaactgccccattttctagagagttatttttggccaacaggggtcgccttgtctgggaggttactcacccccagcagcctgcaaacagtgctgtgtgactctgttgtataaaggctggtcctcttgccccagggtgagaccaacactgtggtgctattcatacttctgagctctctgtgggatcatgctaaggctagattctagatgaaaaccacatctttgctcagcttcttcctctgtcacatgtggcttccctcacttccttctcatgggagcactccccgaagacatcacgtgcagctgaatccccgcctcaggctctgcttctagggagcctgacttacaacattgttatctttttttttgacacagggtcttgctatgtcacccaggctagactgcagtggcattatcaatgaaaaaaatggaggaaatgtttatcaaattgtaaatgactctaagcttgaaggaacaatcagtatgtgagataataatggctaggcacggtggctcacacctgtaatcctagcactttgagaggccaaggcaggaggattgtttaagaccagcctgggcaacatagtgagacactgtctctaaaaaaaaaaaagagagagagatgataacaccaagtagggtttagggcaatctctgtgatccagaatgatggactgaacaagtaaaatcaaatttaacagggatatgtgaaaaagcctatattcagattcacttaattattttattttattttatttttttgaaatggagtcttgctcttattgcccaggctggagtgcaatggcgcaatcttggctcactgcaacctctgcctcccaggttcaagcagttctcctgcctcagcctcccgagtagctgggattacaggtgtgcatcaccatgcccagctaattttttgtatttttagtagagacagggtttcaccaggctggccagcctagtcttgaactcctgagtgatctgcccgcctcagcctcccaaagtgctgggattacaggcatgagccaccgcacccggccttttatttaaatcttttaagtcaacctgcctgactcttctattagaaagcatgcatggcccatcccttgagaaatgcccccactttccccctcccccctcctttttattttttgagacagagtctcactttgtcacccaggctggagcacagtggcctgatctcggctcactgcaacctccgcctcctgggtttaagcaattctcctgcctcagcctcctgagtagctgggactacaggcacctaccaccacattcaactaatttttgtatttttagtagacagggtttcgctctgttggccaggctggtctcgaactcctgatctcaagtgatctgtcccccttggcctcccaaagtgctgggattataggtatgagccactgtgcctggcgtcccctgttatttctgatccctcctttggataggtacaccctcctccaggtcctacatcctctctccagggctggactaggagggtcttcaggaagatgaggaaggagacgcagaggacctaggaaagaaaaatcccttcatgactgagtaggccccaccagcctactttgtccctctcctatttactgccctctttctcctcacagggagccggaccattcctcacccaagagtctacctgtggggaggtatgcaagacagtcctcttctgcagagaactgccagtttgggttttcctttaaactttaaaggaatttgactttcacccttccggcacctacagacccaccatggtcactcatggtcaactatcttttcttagagagaacatgtttaaaactaggtatgtgggtatattcatcaaagggaaaattagctgggcatggtgtcgcacacctgtagtcccagctactcaggaggctgaggctgaggtgggatgacaaggttgagcccaggagtttgagaccagcctgggcaacatagtgagacccagtctttatgaaaatgaaataaaataaattagctgggcatgatggtacatgcctgtagtggtagctactctggaagctgaggcggaaaggattgcttgagcccaggagttctgggtgacagagcaggaccttatctttaaaaataatagtaataagaatacaatttacaagaaggagaaaataaacctggagctcaagccctcatgaaacagtgtacttgaaaaaacaaaggctctattttagtaagtataggttaggtaatgctacaaaaacaaacaaatccaaaatctaagtggctcaaaactacatgttttatttttgttttctttcttttattttctatttatttttttttgagacaggttttgttctgttgcccagactggagtgcagtggtgtgatcatggctcactacagcttccacctcccagcctctgtcattcagataccccaaccccagttctcctttatggaagtaatcaggcttaccaatttcctgtgtctccttccaaaaaaaattctcaacaacaaatacacatttatatacatgagtctgttgtatatagcacatgttgtatatagtacctagaaaaatgcaaaaaaaacttgtatgtaaggtttaaaaaataactcattaatacccagttgaaggaatagaagtgagaagatccctccccaaagcccctgtctgtgcctccctgaacatagccagcttattcctaaacatgctcatgattctgactttagtgatagccatatccttgcctttattttatccttgcctttattttatttttgtttttgagagagtgtctcagtgttgcccaggctggagtgcagtggcttgatcatggctcactgcagcctcaacccccactcagggatcctcccactcagcctccagagtagctgggaccatagcaccacttccagctaattttttttttttttttttttttttttttttgagacagagtctcgctctgtcgcccaggctggatggagtacagtggtgcaacctcggctcgctgcaacctccgcctcctagtttcaagcagttctcctgcgtcagcctcctgagtagccaggcaaccactaccatgcctggctaatttttgtatttttagtaaagatggggtttcaccatgttggccagactggtctcaaactcctgacctgaggtaatccacccgccttggcctcccaaagtgctgggattacaggcatgagctactgctcccagccagctaatgtttttaatcttctgtagtgatgacttcttgctatattgttcaggctagtcttgaacttctggcctcaaacaatcctcccgccttggcctcccacaatgctgggattacaggcatgaaacactgcacccagccctgttaccttaccttttaaaaaagaatagttttagcacctgtgtacacatccccaaataatataggttcttctatttttgaaatgtatggactggaatcatatgttatacagtgtattgtcttttttttttttttttttttttgagatggagtcttgctctgtcacccaggctggagtgcagtggcacaatttcagctcactgcaacctccacctcccaggttcaagcaattcttctgcctcagcctcctgagtagctgggattacgggaatagaccacgacgcccagctagtttttgtattttcagtagaggcaggatttcacccggttagccaggctggtctcaaactcctgagctcaagtgatctgcctgcctcaacctcccaaagtgctgggatcacaggtgtgagccactgtgcctggcccactgtattgtcttttgtgtcttgtctttctcagttaacattttgtttctcagattcatccacatatagttagagttttgtcatttccattattgtgtagtatttcattatgaatataccgtaatttatcaattttccttttgggggacatttgagttttcaacttggggctattacatgcagtacttctatccatgggtcttggtgcacatgtgcatgagaaggattcctgggttatagagtgtgtcttcagttttactgataataccagatagttttccaaagccatattagtttatgttctcactagtagtataaaaatgttcgcattctctctacctttgtcaaatcttggcattgtcagagtatatgattattgattattgtaaacacatgggagtgtagtatacagtttattctccaaacttgccttttaaaaaacacaatacagcctggaatttatgctatcaaaaatatgaagacattcatttgtatgcttgtataacatattatgatatcaataccttactttttccctcctctttcttgaataatgcatcattttcaacatagacttgtagggcaaagatggcacattattcacagctcatttctctgcctgtggcagacattactaattgatcacaacactctttgccactgagtgcagatgtagcctcagatccctttcaatgcagtgctctagtaccttgctactcaaaatgtagtttccgaactggcagcatcagcattacctgggagtctgtgagaaatgcagaatctcagacccaccccaaactccctgagtcacatcctgcattctcaggtgattcaccacaaggaaggctgggaagtgctagcctaggctgcccttatcaatcaatcaaagccattctatgggatgaatgtgtgtgtcctccctatttcagaggcacactacatggctctgtccttgctcctgtccttttccaagcgcttatctatgcattgtatgagaacataggtcataggctgatctgatttgctgacagtaagaatctcaggggaaagctgaaacactggattggggaatcatgatacaaacccactgagaggatggagcaaaggaccaatttcaacaattggctaaataaagttcaaccaaaaaaaagacttcacaggagtatacttgaaaatagggcattagggggttcacagcatctgttccggaacaggtacctggtgttcttaagagggttctattacagattagtttgggaagcaccactgtgctttttcctcctcttagaaagtccatttataggccaggcgtggtggctcatgcctgtaatcccagcactttgagaggccgaggcgggcagatcacctgaggtcaggagttcaagaacagcctggccaacatggtgaaaccccatctctataaaaatacaaaaaaattagccaggcatgatggcgggtgcctgtaatcccagctactcaggaggctgtggtgagagaatcgcttgagcctaggaggcagaggttacagtgagccgagatcgcaccattgcaccccagcctaggcaacaaaagtgaaactccgtctcaaaaaaaagaaaaaaaaaaagccatttatgtggctgggtgtggaggctcacacctgtaatcccagcacactgggaggcagaggtgggagaattacttgagcccaggagttcaagaccagcctggacaacacagtgagactctgtctcaattaaaaaaaaaaaaaaaagtcaatttatgcactagaaaatacagagacctggatgcccatggtaaagaagtaaatttctctttgtttaaatcagtagtcctaggtcgagcacagtggctcacacctgtaatcccagcactttgaaaggccaaggcaggccaattgcttgagttcaggagtttaagaccagactaggcaacatggcgaaaccctgtctctactaaaaacaaaaatacaaaaaattagctgtgtgtggtggtgcatgcttgtagtcccagctactcaggaggctgaggtgagaggatcacttgagcccgggagttcaaggctgcagtgagccctgacagtgccactgcattccagcctgggaaacagagtgagaccctgtcataaataataaataaataaataaataatcagcagtccctaaacagaactgtatattacctattgatatctacagagctggtattctatggaatacaatgtgggaaacactggcttggggctttggtttatagactgagctatgaagaagacaatactagctttgaagcacataaagagaagtatagtctccagggacagagagaggagatgctctgctccctgcattctgagcaccatattgccttcataagttacgagggagggacattgagagactccagtgtcttcagagatggactccaggacagtgaagcctcaccacggctgtcctactgtgaatgtctaacttagagcagtttttcctatcctgtctcaacgcagtaactggggaggaggaagggaggctggtggatctgagtgcttaagaaggccccagaggaccaaaagtctccaggggaggactgcataatcctcctccatccccctcaacaggaatcactaagtagctgctatgaattttttttttttttttttttttttttttgagatggagtctcgctctgtcacccaggctggagtgcaatggcgtgatctcatctcactgcaacttctgcctcccagtttcaagcaattctcctgcctcagcctactgagtagctgggattacaggggtgcaccaccgcacctggctaacttttgtattttttggtggagatggggtttcaccatattggctgggctggtctcgaacttctgacctcaagtggtctgcccacctcggcctcccagagtgctgggattagaggtgtgagccaccatggccggcctgctatgaaatacttaatggcacatcctgtggaaaaggaactaagctttctttgagggggatcggagaacagacctgagacaggtggattaaagttacagaaaagtgaaaagtcatacaagctgcatatacatacagatgtacacatacatgtgtattctctgaccatgatgaaatagaatttataacaaaaatccaaaaaattatcccaaaatttgttaacttggaaaaatttctaaatgattcttggttccaaggggaaataaaaacacaaattacaacctagaaataaaacataattagagagctacatgtcaaaatctggaaaatgtggccaaagtggtacttaggaaaatgcatacccacaggctcacagataacgaaacaagaaagactggctgggagtggtggtgcgcatctgtaatcccagcactttgagaggctgaaagcaggtggatcacctgaggtcaggagttcgagaccagcctggccaatatggtgaaaccctgtctctactaaaaatacaaaaattagacaggtgtggtagcgcacacctgtagtcccagctactcgggaggctgaggcaggagaatcacttgaacccaggaggcggaggttgcagtgtgctgagattgcaccactacactccagcctgggcaacagaacaagactccatctcaaaaacaacaaaaacaaaaacattatcaggccgggtgcagtggctcacgcctgtaatcccagcactttgggaggccgaggcaggtggatcacctgagttcgagagttcaagaccagcctgaccaacatggagaaaccccatctctattaaaaacacaaaattagctgggtgtggtggggcgtgggtgtaatcccagctacttgggaggctaaggaaggagaatcgcttgaacccaggaggtggaggttgcggtgagccaagatcacgccattgcactccagcctgggcaacaagagcgaaactccgtctcaaaataaaaaaagactgacattaagtaaattaaattttctacctaggaggctgacaagtgaatagcaaaataagtccaaaggaagtataagcaaaaattactaaagatgaaaacaaaaataaatcaaatgaaaacaaaactcaataataaattttatcaaaccaaatgctaattcaatgaaggaaaaataataaaatggacatttttgaaaaaggtgatcaaagaaaaaaaagagttgaaaacaaagatagcatttgtagtaagaaagaaaaccaaagtacagatacttgtacagattaaaaaaataccaggggctaggcgtggtggctcatgcctgtaatcccagcactttgggagaccaaggtgggaagatcacttgagcttaggagtttgagaccagcctgggccaacaaagtgagatctcatctctattaaaaaaacaaaaaccaaaaagatatctttttttttccatgaatgaaatgcaaatatccaataagcacatgaaaagatgaaaaatataggaaggcaggtttagtctcattataaagactaacttcctcagccaggtgtggtggctctcacctgtgatcccagcactttgggaggccgaggtgggaaagatcacctgagctcgagtttgagaacagcctaggcaacatggcaagaccccatctctcaaaaaaaaaaagattaacttcccaatgcattgaaataacccatgagtatcatgaactctgtcacaaggaagggacaccagaggctcagatgttggctgagaggtgaccaattgtcaggagcaggggcactggtgatcttaggggatgggaacagagaaatctctgtttctgtgatttccatgatccatttccctgagctgcttgttttcaccaatggtccttgttgttatgggcagcaaagtccctctaatgatctctttgaggctagccagcaggggagaagtggctgtgagtggggcctattttcctggcttgcaggaagccagggggccagagcagaggccccctactgcccttcactcctcactaccaccagcttcccaggtgtcctggacgcatgtgggatgcctctgagataaccgggttaaggccagggcctgtctaacgcctgggctctggagcaggacccgggttctgtgggagctcatatgaaggacaggaagtgaccagtccacagactggaccaaaggtctgtgactcactggttgtatgtagtagggatcacgcccctgccatgccaaacaccaaaactgtaggtcagattggagttgtactggagtaataccatgacgaggagtgggctgcactggagacccccgtccctggaatgaccggggaagcaggggctgatgtgaggaagggtggagaggggctgcggtgatggcgaaggaggccacaagttcccggttttggcatgctgctcaggccttcgcctccccatgctggctgtattctacccgcacacccatattggcccagactgggaaacctcacagctttgctaagtcatggtcaggttagtcaaggccagtaaaccacgtgggtgatgcatcattgccaccctggcacgcctccttccagaccaggctgggactggctctccacatcccagggcctggccttgggcttctctgccagctggtcagggtgagtcactcttctttggaggatgctgccttcctctaatgttggacatgaagggcttttttgtcctcctagagttctggagcatcccagaaaaggcaaaactagggagcagaggaaagagaacattttttaaaaaacaaaaatgttgcctgggcgcggtggctcacgcctgtaatcccagcactttgggaggctgaggtgtgaggatcatctgaagtcaggagtttgagaccagcctggccaacatggtgaaaccccgtttctactaaaagtacaaaaaaattagctgggtgtggtggcgtatgcctgtagtcccagctacttgggaggctgaagcaggagaatagcttgaacccggggggcagaggttgcagtgagattgtgccactgcactccagcctgggcgatagagcgagagagactctgtctcaaaaaaaaaaaaaaaaaaatcaaaaccccaaacatacccaaggaccctcctcctggttattcacacctgtgattaacgaggtcacaccttgactgtcccttgggtcagacagaacttcgctgacccgggttcatgctcatcatccctcacaggcaggagggtgttcatcccctcactcacctgtttccagtctctggcccccacccctggggtcctcagctgccaatccacatacatccaagcccctgtttaagcttttaattgctcccactgacttcaaaatgaagcaatattccaccgtcttagcttgggtttacgtaaaagtagatttcaggtatggatagtttctttggaaaggactccaagtagtggagaagtgagaaacggcgcagggcggaaagccaaggaaaggtgcattgaagtgcagatgatcactgcgggcaccaggctcagtcctgcagggatcctctgcagagctgggtaaaagatgcttcagaattatccggtgaggggggaaaacaggtgggcagttactcactgattcctggcactcattggttgagggttgtcctcaggaaaataaagccccagtatgtccaggctactctacacaggctgagcaagtctcagtggtgctggagaaacccgtgtggtttctgcagtgggaacatgtcaggtgtcctggaactgcccaccacgctgcagatgaatatgccacaatgtcaacagtgtttaggctcatatatatatatatatatatatatatatatatatatatatatatatatattttaagacagtcttgctctgtcacccaggctggagtgcaatggtgccatcttggctcaccacaacctccacctcctgggttcaagcgattctcctgcctcagcctcccgagtagctgggactacaagtgcgtgccaccacacccggctaatttttgtatttttagtagaggcagggtttcactatgttggccaggctggtctcgaactcccgacctcatgatccacctacctcaacctcccaaagttctgggattaaggcatgagccaccacacccggcctccccacccagcccccctctgctttttttttttttttaagacagagtctcactctgttgcccaggctgaagtacagtggcacagtcatgactcactacaacctccgcctcctgtgctcaagtgatcctcccacctcagcctccagagtagctgggagtacaggcatgcaccaccagacctggctatttttaaaatttttttgtagagacaagagatggagtctcaccgttatccaggctggtctcaaattcctgggctcaagcaatctgcccaccttagcctcccaaagtgctgggattacaggtgtgagtcactgcgctcagcctcaggctcctctttcttgcttcaccatccattatcaaggtcgttctcttcaagtttgcaaggcacactgcagttccacatccaggtcccaggcaggtggaaaggtaaaagaatgtcttgcagctgatattgcagctgttcccgttttaaggcgttttctccaacaacttccacctgtgttccattggtcagaacctagccacatgaccatacctagttagaaggcatgctggaaaacgtagcttttctattaatggctgtgcgtattagtctgttctcacactgctatgaagaaatatccgagattaggtaatttataaagaaaagaagtttaattgactcacagttctgcattgccagggaggcctcaggaaacttacaatcatggtggaaggcaaaggagaagcaggcaccttcttcacagcgcaccaggacagagtgagtgcaagcaggggaaatgccagatgcttataaaaccatcagatctcatgagagtcactcactatcacaagaacagcttgggggaaaccaccccatgatccaattacctccacctagtacctcctttgatacatgggaattacagggattacaattcaaagtgagattcgggtggggacacagagccaaatcatatcaccatgttaggccaagattatccagcggttttattactcatccagctaaggttcagtggttctattactaaagaaaaaggggagaatggatgtagtactgggcatccagccatctgtaccaccctgcagtccctttgtgagaatatgagcatcccagtctcttcagcatcgctctcagtaccaaggatggtatgaaggggacaggaatcctcctaccctcaggaacagaggtggggccatggggagtggtctgcgccattctcaccattcacaagaggagttgcatagggggtagagggcagctggaattcctttggcctgctcctctaggcatatggaacattccctccacatatcctgctcttagtaggagaagctctctgctgcattttacaatcagtcattttcatgctgacgtacttattcctaggacattttcagtttagcccttttaagatgcttatctcaaattagaggcaccaacctcagtcaggtgatgacacctgtgttcctcttccttctggaagccttgagctgagtcctccttcgggactcctcccactgatgcctcccatcatgtacccacgggatgctggtagatgtttgtggtcagctttcttttgttcccgtgaggtggattcgagactctgagaaagaaacaccccttctcaattccaccacaagttctgcctcttcaaccctcaaaaaatcctaattgtcaagaaatcacatcttatgcattttggtgctccacaacacttcctgaaggcctgtgtgaggcaggagctcaagatctacttgttcactgcatggttgtttgtgatctgtcactcagtgagtgaccaagggaaactacctctgaagagagcagacaccgacatttccttccctccccgtagatgaatgctgcaatgcatttcaaggggtagagtctaagtccctttcctttcctttcctctcccctttcctttctttcctctccccttcccttcccttccctttccttttcctttcctttttcctttgtgagacagtctccctctgttacctaggctggagtgcagtggcaccatctcggctcactgcaacctccgcctccagggttcaagtgattcttgtgcctcagccacccaggtggctgggattacatgcatgcaccaccacatctggctaatgtttgtatttttaggagagacggggtttcaccatgttggccagactggtcttgaactcctggcctcaagtgatctgcctgcctcgacctcccaaagtgctgggattacaggtgtgagccactgcgcccagcaaattcccttttctttgaattggggctgaccttagtgacttaagagtggaagggacatcttgtgtcttcccgggcatggagttaagaagccttacgggtctcatctagctctcttggaactttgctctcgagacactccttctcagaccccagcccccatgctaagtggactcctgagccacctggaaaggccgtgcatcaactctccagttgattgtcccagctgagttctcagcagacaattagcatcacctaccggccacataaatgagccatcttgtatttgcatccagttgagtcttgcgctaactgtagcactaaccaatatctaacaacaatcacctaagagatcccacatgaaaactgctgagctgagcccagtgaactcgcagaaccataagacacaaaaatcaattgtccagtgatgaagtgttggggccatttgtaatgcagaaatagataaccggaagagtgactaagccaggaagagaacctggaagaagttgtcttgatcaccgaggagtcttactggtgagaaagcactgcccagctgacctactctgccatattcctgatccagatgcgcaaagggctgtggtaggtgacaggtggcctcctttcaccacaatggttccactaattcaagtgtaagtgaaagcagtatttaattattgagagggtgaagacctaacaaatatttgcataaaagaatttttgtttaccctttgcaaataacctggcagattttgcttgttggttggttctttattttgcttttgagacaagatctcactgttgctcaggctggagtacagcggtgcgattaaggctcactatagccttgacctgttgcactcaagcgatcctctcacctcagcctcccaaatagcacagcaccactcctgattaactttttttttggttgctctgaaacaaatgtggcacaataaaagaaattggcttcccagaagatgtatagaatcttctgtttacttgttcatttttccttattttctaggagtgaacaatgccccatttccaggtgaatggcaatggagtagttgtccgagggtactcaatactcaagagtcagctgatcatgtccttagatgcaccagaaatgatggtaaagcttgggagtgcggatacctttgattctaattattagcgaatgcctcagctcagcatcactgggctatatggggcctaaagcagggcagagccaatcaagaacactcaaagacagacagatgcagaactgggaatggacgtgtagggacgggaagctggagaaagatgggagcatgaatatgcatgtaagggtacatagatttggccgggcatggtggctcacacctgtaatcccagcactttgggaggccgaggcaggcagatcacctcaggtcaggaattcgagaccagcctggccaacaaggagacaccccgtctctactaaaaatacaaaattagtcaggcatggtggcgatgcctgtaatcccagctacttgggaggccaaggcaggagaatcgcttgaacccggacggcggaggttgcagtgagccaagatcgcgccattgcactccagcctgggtaacaagagcgaaactccgtctcaaaaaaaaaaaaaaacaaaaagggtacatagatttatagttatagtgatacgtatatagcaaggtgaatacagacattaatatgtgcatttagagaaagatatacaggacgtagaaaaatgtcttcttttattttttgagacagtctcactctgtcacccaggctggagtgtagtggtgtgatctcagctcactgcaacttctgcctcctgggttcaagtgattctcatgcctcagcctccaagtagctgcgattacaggtgtgtgccaccacgctgccaccacacccagctaatttttgtatttttagtagagatggggtttcaccatgttggtcaagctggtcttgaatgcctggcctcaagtgatccacctgcctcagcctcccaaagtgctgagattacaggtgtgagccactgcgcccagccttttttgagtttttgttgaagatagggtctcactctgtcgcccaggctggagtgcagtggcaccatcatggctcactgcaaccttgacctcctaggttcaggtgatcctcccacctcagccggctgagtagccaggactataggcatgcaccaccatgcctggctgatttttgtatttttttgtagaaatggggcctcactgtgtggtccaggctagtgttgaactcctggcctcaagcgatcttcccacctcagcctccacagtagctgggattacaaacaagcatgagcctccatactcagcccctttcgaatcaagtagttcttggcgagtttgcaggaccatagttccctgtccatggtgatggttccagggaaggatagccacccatgttggccaagaagaactctccccggcatctttctacctggagctggtaggaaagagtgtttttttcctttttggccgtgagactataagaacatgaacttgaagtttcctgaagatctagttccagccgggcatggtggctcacgcctgtaatcccagcactttgggaggctgaggtgggcggatcacctgaggtcgggagttcgagaccagcctgaccaatatggtgaaaccctgtctctactaaaaatacaaaaattagacttgcgtgatggccggcacatgtagtcccagctacacgggaggctgaggcaagagaattgcttgaacctgggaggcggaggttgcagtgagccgagatcacgccattgcactccagcctggaagacagagcgagactccacctcaaaaaaaaaaaaaaaaaaaaaaaaaaagatcagttccaacttctctgtggagactgatgacttgagaaacaggagccaaacagcacagtaacttagtctggattccccagaaatagactctgaagtgaggattcatgtacaagagattatgaaggaggtgcttccaggggaaacagtaagggaatgaaggaggcaggtcagggaaaaggagaaaactgagctagggtggcatttcatgtgaggttccagtctcagtcttgtcccttgggaagctgtggggtgtcaattatgcctcagggttatccttcttcaaagcaagagatctggactttcttcctcccacactatcaccctggtaaatataaaatcccagcgcttacacaacagctccaaaaactccagaaagactctcctgaacgtcacaggtgtgggaaagaaccaggaaggttctgaaggtggggcacacaaagacaatgagagagaatgtggacacagggagccctagttgaagcagcctggaggttctgcatttttcctgccctggggcttggctttggtggctcacactgagggaacttcactgtgtatcctggcttggtgccactggctgggactccagggtgtggtcagagctgctggagggcaggaccagagccagggcctggctgaggcctggcaccagggactgtacaggcgaggctgcctgggccctggatgaagagcagtgatgtgaggtgccagctcagacgccagagataggaaagcccaaaggctagcctaaggcttgggtagtgggagttgatgcaacaaagtgggggagactgaacaacggcttcctctctcttcctttcactcttagactgtcctccttgaagggaatcagattatgccaccccaaaatatgccacattggcacaagaattattttgagctgaagccaattaagaaatagcagacaccggaagaactctctgcctgtgttactgtgtttgcaggaatacctgaagctgggaatttataaagaatagaggtgtatttggctcacagttctgcaagctctacaggaagcatggcatcagccagggctcagcttctggtgaggactcagggagctgccactcatggtggaaggtgaagcaggagcaggcatgtcacatggtgggaacaagcaaggcgggggaggggccacacttttgcacaaccagatcttgcctgaactcagagcaagagctcactcattaccatgagatggcaccaagccatttatgggggatctgcccccatgacccgaacacctcccaccaggcccctcctccaacactggggatcacacttcaacatgagatttgaagggggcacacatccaaaccatatcactgcccctcccatttctgcctaaaagcagaacataaatttccatttgtaagggtgtctttctctccctaccaggaagagtagaataacgcttaatcaccattatcactggagatggtaccaagatgaatctgcgtaaatgaaccttactagataccccttatctaacctatctatagtttcccccttatatttactttcccacagtttacaacccctagaagcccaaacccatttttctttgtctagttacctctccacaatttgtcaccctttgttaaaatgatataaactctcaggcctaaccactgctttaggtttcacttcttttctgtgaagtccctgtgtaaacacaaaataaaactttcctcctgtcaatctgtcttttgacagtttaactctcaggcccagctatagaatttaagagtagaggagaccgggcatggtggtacatgcttgtaatccctgcactttgggaggccaaggcaggcgaatcacttgagctaaggagtttgagaccagcctgggcaacatagtgagatcctgtctctatagaaaaataaaaataatgaaaacattttattgccttttaaaaaaaattttatttttattactttttaaaataaagacaggccttgctatgctgcccaggtttgttttgaactcctggcctcaagcgattcttccgccttggcctcccaaagtgctgggattataggcataaaccaccacacctagccataaatttaatgttatatgtttttttaccacaataaaaaaggcatacagaatgtaggtatatacatttatctaagtgcatcaacctgtatagttaaagtggtacttttttttttttttttgagacaaaatttcactcttgttgcccaggctggagtgcaatggcacgatctcggctcactgcaacctctacctcccgggttcaagtgattctcctgcctcagcctcctgagtagctgggattataggcatacgccaccaggcctggctaattttgtatttttagtagagatggcgtttctctatgttgatcaggctggtctcgaactcctgaccttaggtgatccacccgtctcggcctcccaaagtgctgggattacaggcgtaagccaccgcgcccggcctaaaatggtacattttatggaacacagatagtactccagtaaagctgatttaaaagaataaaataaaactaaaaagaggccaggcgcggtggctcatgcctataatcccagcactttgggaggctgagggtggatggatcacctgaagtcaggagtttgagaccagcctggccaacatggttaaaccccatctctactaaaaatacaaaaattagccgggcttggtggcacacgcctataatcccagctactcgggaggatgaagcaggagaatctcttgaacccgtgaggcagaagttgcagtgagctgagatcgcaccacttcactccagcctgggcgaaagagagaaacttcgcctcaaaaataataatcataataaataaataaaaataatctttttcctataggggcccaacctcatgacatcctatgaaatcatgttttgcaattgctgtcaaggtttctaacaatgagaccaggtttagtggcttacacttggaggccgaggcaggcagatcacttgagtccaggagtttgagaccagcctgggccacatagcaaaacactgtctctacaaaaatatatatacaaaaattagctgggcgtggtggtgcgcacctgtggtactagctacttgtggggctgaggtgggagggtcgcttgagcttgggaggtggaggttgcagtgaattgagatagtgtcactgcactccaacctgggcaacagagcaagaccctgtctaaaaaaaaaaaaaattgcagcaatagctcaagcacccaagtccttcactggacaggaagtgtcctaagggtactttctatggtctggttgttattgtgccccagaggatgatgtgatgcagtgacttgagaggcaagcattaaatgttgttggctgggcatggtagctcacgcctgtaatccagcactttgggaggccaaggcaggcggatcatctgaggtcaggagttcgagaccatcctggccaacatggcgaaaccccgtctctactaaaaatacaaaaaattacccaggcatggtggcgggcgcctgtaatcccagctactcgggaggctgaggcaggagaatcacttgcacccatgaggtggaggttgcagtgagctgagagcgcgccactgcactccagcctggctgaaagtgagactctatctcaaaaaaataaataaaatgaaataaataaatatcgttgaatggatggactcaccaatttgtatttgtctgttatgtaacaggcatctatgtatattctctgtgtatactttgcctgtttatattcttggattgatattctttttttttttttttttttgagacagagtcttgctttgttgcccaggctggagtgcagtggtacagtcttggctcactgcaacctctgcctcctgggttcaagcgattctcctgcctcagcctccagagtagctgggattacaggcaagcgccactacacctggctaatttttgtatttttagtacagacggggtttcgccatgttggccaggctagactcgaactcctgacctcaggtgatccacccaccttggcctctcaaagtgctgggattacaggtgtgagccaccatgcccagtcaattgatattctttaaattcattcatacattctttcaacaaatattggcagagtgcagtggctcacacctgtaatcccagcactttgagaggccaaggcaggaggattgcttgagcccaggagttcgagatcagcctgggcaacatagtgagaccccatctctacaaaaaacaaacaaaattagctgaacatggtggcatgtgcctgtagtcccagctactcgggaaactgaggtgggagggtcatttgagctcaggaaagtagaggctgcagtgagctgagattgtgccactgcactccagcctaggcaacagagcaagaccctgtctcaaaaacaaaacaaaacaaaacaaaaaccaaacatttactgagtcccagctatctgacaggctatcctaaatgttgaggttacacagtgaccaaaatagacaaaaatctggtccttggcctggtgtggtggctgacgcctgtaatcccaacattttgggaggtgggtggatcacctgaggtcaggagttccagaccagcctggtcaacatggcaaaatcccgtctctactaaaaatacaaaaattaactgggcatggtggcgcacacctgtaatcccagcactttggggggctgaggtgggtggatcacttgaggtcaggagttcaagaccagcttgaccaatatggtgaaactccatctctactgaaaatacaaaaattagcagggtgtggtggcaggcgcctgtagtcccagctacttgggtagttgaggcaggagaatcacttgaacctgggaggcagaggttgcagtgagctgagattgcaacagcgcactccaacctgggcaagagagcaagactcaactaaaaaaaaaaaaatctgtgcccttgtggattccatcttactaggggaaatacttgtaagtaagataaatttgtgaaatatatactatgatggtagtgagtattaaggagaaaaatgaatcaggatcagagataagtagcatggggcctgggggcttagcttcactgaggtgatatttgtatcaacacttcatgaatgacacacagacatcaacctcactgccccatggaagtataatctgaggcagagcagtagaaactggctcaggagaaaagggaggatgcagacatgtcaattagacacagccaaagatgcttcatgatttcctgggtgtgtgacctgtgtagacgcccagggacccatgcttagagggactctgtgcttgatttaatgctctgctgtcaccctcttgaagtttttaatcagtttttaaacaagggactgcgcattttcatttggcactgggccccacaagttacaagttatgtagccggtccttcactctgttgaataaacaatggcttctccctatcaccctctttggaagcacagatactcccagcaaatgctaatcattcatgtttctaatttcctggggtgacttgtttttcctctaacaggtgtgaagtatgagatagagactgtatcatccagggtaggctgggatatgctgcatgacagaaacccccaaatctagtggcttaacacaacaaaggtgtacttcactctcgcactttgtgttcattatgggtcaacgcggggctctgttgtgcatcacgatcactctaggaccgtggcagagggaaagtgaaactggcggttagagccgctactcagaaatgacacatattgcttgaactcacatttcctcgccaaggcaagtcatgtggcgacgccctcctttaagagatgaggaagttcaatccaaacatgagcccacagaactgggccacttgtcttttggtgtgtttttttgagacacagactcttgctctgttgcccaggctggactgcagtggtgtgatcatggttccctgcagcctcaacctcctggcctcgagcaatcctcctgcctcagccttccaagtagctgggactacaagcatgcaccaatgggcccagcctacatttgttaattagttattccaacactatttattaaacaagctatcctttctctggtgattttaattgcccatttatcacatacaaaattttgctgatatttgtgactctttttgcatagtgtttctgttccattgatttttctttcaatgcctatgcagaatcaccctgttttaatttctgtaggtttataatgccattttattttattgttttagagacagggtcttgccatgttgcccaggctggccttgatctcctgggttcaaggaatcctcctgcctcagccttctgagtagcgggactacaggcacaagacagcatgcctgatttgtaatgtcatttaatatcaaagaggttaagtattctcaagtttcccctttgacttttccttggctattatattaatcttttatttctagatagatttcagaaccactttgttgaattcccccactccttctatgtgattttgattagaatggaattgcatttgtagatgaatttgcatttctttataatattgagactttaggtttttgttttgtttttagagacagcttgctctgtcaccgaggctggagtgcaatggcacaatcatagatcactacagcctccaactcctgagctcaagtcatcttcccacctcagctgggactacaggtgcatgccactgcacccagcttttactagtgtaatgaaataatctttccatctcctgggagaatggtcactcacgactgaaattcactgaaatttttaaaaaagaagaaaaaaaaattggaaagccttattttctctctctcctttcttttttgagacagggtcttgctctgttgtccaggctggagtgcagaggtgcgatcctggctcactgcaacctctgcctcccaggctgaggtgatcctcctgcctcagcttcccgagtagctgggactacaggtatgcacccccatacctggctaacttttgtatttttagtttaaaaaactgcatagtttttgtttgtttgaaaaaaatcattacatcttactgagatacttaagaagattattttataaaactaataaaagctgggttactatcttcagtaactttctattaatttgatcttcaagtattttgttttatagttattgtgaatgagacaatgttcctaaatgttattctagtagagtagaagttctctcaattttgatattatttgtaatcatctatcctgctgctaagctctcttattagtgcaaacagctttttgaaaaaatctctgtgtccttaatgtagacgccggaaaataaagaagaaaaatcctcttggtttttgtaagttgcaattaatgtgttcacaaattatgattagttgctcatctttgtttctttcctttttctttttgtaccagtttcatacttctcatttctacagcaagactgaaagttgctgtgttaactgatacaatttaatttctactgtcttctgtgaccccatgactgcttctctccagcctggcagcagctagcgtgttcagtgcctactggcttagggaaggaatgacacagcagaatgtagaaaaaggaagtcaagttcttgaaatttttagtttctaaagtctttctgtctttttttttttttgaaatggagtctcagtctattgcccaagctggagtgcagtggcgcaatctcggctcaccacaacctctgcctcccggattcaagtgattctcccgcctcagcctccttaatagctgggtctacaggcatgcgccaccacgccaggctaattttcaccatgttgcccaggctggtctcgaactcctggcctcaggcgatccactcaccttggcctcccaaagctgggattgtaggcatgagccactgcacccagccatctttctcagacttgaaatagcagatgaggcgagtgacactctataccaggttacacactgtggcccctggacccctgctgatccatgaactgtctgttactgtccatgatgagttaagtacagatattgagaacaaacatttagcagctgttacagcaatatgatgttgtcacaatatccaagtgcatgattggcagactcatttcattcaacagtgtacaggccaaaaagattaattcatgacaattggaaataaaacaaaactggtcttccatcatagattgtttgataagtgcttctttaactagaagtctctagatgcagagaaagaggagaattagagagaagcatgtgggtttgaatctgagatgtgtccctgcatcttatcccctcccctagaagcccaaaaaactgctgtaagtgggcggtgggggatggaaggggcgagctgccagcaggagaacaagagatatccttgacaagccagaaagctggaatcggaagggacccatgccctttttctaagtagagtctgggaagtggcaagacagtgaaaaggctatgggcacagcaggggagctgggtctggcagcccacatggttctcacgcaccccggcggagcagcagaacaatttgatgtgtgtccagaaggagcccaaaggtagcaaagaaccttgaacactcccacgaagtaggcacacacgccacctaaagctcccacatgcccaaatggggtgcagaaggagctaagagacacagatcagaagaatgttcatagctgagaacagggaacaaaaccacagctacctgtatcaccagtacccaaagcctagacaaaacaaaatacatcttagccagtgtggacactcaagagtcagatgatcctcctttctggaggccttgacactaaatgacagccctccctgcttgctgtcagaaaggggaacactctcattatgacgaggagtaaatttccatcacctgggagaatggtcactcatgtttgaaattcactgattttcttttttttctttttttttttttttttttagacagagtcttgctgtgtcacccaggctggagtgcagtggtgcaatctcggctcactacaacctctgcctctcgggttcaagcaattctcctgcctcagcctcccgggtagctgggattacaggcacccaccaccacgcctggctaatttttatgtctttttttttcttttttagcagagatgtggtttcgccatgttggccaggctggtctcaaatagctgacctcaggtggtccacctgcctcggcctcccaaagtgctgggagccaccacgcccagccattcactgaaattttttaaaaagaagaagaaaatgggaaagccttgtttctctctctctttctctctctctctctctctttttcgagacagggtcttgctctgttgcccaggctggagtgcagaggcataatcccggctcactgcaacctctgcctcccaggctcaggtgatcctcctgcctcagcctcccaagtagctggaactgcaggtgcatgccaccatgcctggctaatttttgtatttttagttttttaaaaaataactacatagtttttgtttgttttgagacagagtcttgctctgttgcccaggctggaatgcagtggcacgatctaggctcactgcaacctcaacctcctgggctcaagcaatcctccctatctcagcctcctgagtagctgggattacaggtgcccaccaccacacccagctaatttttgtaccattagtagagacagggtttcaccatgttggccaggatggtctcaaactcctgactctcaagtgatccgctcaccttggcctcccaaaatgctgggattacagacttgagccaccatgcccagccttaaggaaacccttatttcttgcaaggctatctgtatattgacattcatacctcctttggctttgttcaatcaaaatgatagacgttagtgggcatttttaccttgtttctgattttaatgggaaggtatttggtattttattattagttatggcatttgtgattaattcttcatattgttttttttttttttttctttttcagatggagtttcactcttgtcgcccaggctgtagtgcaatggcgcgatctcggctcattgcaacctccacctcccgggttcaagcgattctcctgcctcagcctcaagagtagctgggattacaggcgtgcaccaccacaactggctaatttttgtatttttagtagagatggggtttcaccacattggccatgctggtctcgaactcctgacctcatatgagccgcctgcctcagcttcccaaagtgctgggattacaggcgtgagccaccgcacccggcctaattcttcatatacttgatgatgttagggcccatctttttgaagttggttagggagatttttttttttttttttttttttttaggagcagaggtttaatagaagaaagagaaagaaaaacagttctctctctctattgagagagtggggacctctgagaggaaagacccagctagggagttttaatatgcctttttattaaatcaggaatagctgtcgaattttgtctgatggttttttggcttctatcaagaagagagtcatatgatttttctccttcaacctattagggcactcaagtacacacagatttccttaatatacctttgactttgcccatttgttttaacccacagcttggttttatcttattataatttatttacaatcttaaaatcaatatttataaatgaagttggcatgtacatttcttaacacattcgtttggatgggctttgatataagcattctactaggcttgttaaatggacagtgttgcttctaaacttttctcttgctttagattctagaatgccaaattacctacagtctttcttcaatgtttagtagaaaatttccataatattgttcaactaggtctgaaaatttggaggcataagatctttttctctctcttttattttaggttcagggaatacatgtgcaagtttgttacgtgggtaaattatgtatcgtgggggtttggtatactgactatttcgtcacccaggtaatgagcatagtacctgaaaggtagttttttgatcctcaccctcctcccactctccaccatcaagtaggcctcggtgtcaactgttcccttctttgtacccacgtgtgctgaaggtttagctcctgcttgtaataagtgagaatgtgtggtatttggttttctgttcctgcgttaattcatttaggataatggccttcgggtccatctgtgttgttgcaaagaacacgatcttattctttttatggctgcataatattctattttaatttttttttttttttgagacggagtcttgctctctcacccaggctggagtgtagtggcacaatctcggctcactgcaacctccacctcttgggttcaagagattctcctgcctcagccccctgagtaactgggactacaggcgtacgccaccacgcctggctaatttttgtatttttagtagagacggggtttcaccatattggtcaggctggtcttgaactcctgacctcgtgatccacccacctcagcctcccaaagttctgggattacaggcatgagccactgcgcccgtcttctattttaatttttattattattgttttttgagatggagtcttgctctgttgcccaggctggagtgcagtggcgcaatctctgctcactgcaacctccgcttcctgggttcaagcgattctctccctcagcctcctgagtagctggaactacaggcgtgtgccaccacagccagctaatttttgtatttttagtagagatggggtttcaccatgttggccaggccagtctcaaactcctgacctcaggtaatctgcctgcctcggcctcccaaagtgttgggattacaggcgtgagccactgcgtctggccccataatattccacgttgtatatgtaccacgttttctttatccaggccactgttgatgcaacataacatctctggtgactcttttcccatcctccagagttagctggtttattccaattttctatttcttcctgagtcaattttagtaatttatattttatttttaaaatagtccatttcatttatttttaaaaagtccacttcatttccattttttaactcacacacaaggttgtacctaatatcctgttacctgaaagtttatccctgaatccagaatttcatctgaaggctgtattcttggactccagattgccacctacaacatcctctctgatctcaccgtaggtacaaaccttctttttgtacaagtttctcctgttgcaggtagcaactctcctccaattctcctgttccattttttttttcatgctcctgaatctttttttgtttttctttttttctttttttttgagacagagtctcactctgtcacccaggctggagtgcagtggcacaatctcagctcactgcaacctctgcctcctggattcaaataattctcatgcctcagccttctgagtagctggaattacaggcatgcgccaccatgccctgctaatttttgtatgtttagtagagacagggtttcaccatggtggccaggctggtctcaaacttctcacctcaagtgacctgctcgcctcggcctcccaaagtgctgagattacagtgagccactgcgcctggcttcctgaatcttttcatgagccaagttcctctttacatctttacccaaaggagcctgtttttctctggtgtcaggagttgtgatatgggtttcctgttctaatcttgtagtcccagacaaaaaaaagccatactttatttgggcttatttaccagatttagatgatgagctgagagtgaagagaagggctggacccccagctagggtaggggacgggaggccaggctcttttccatgacataaaggactctccaatatctcacctgcctgcatcctctcccaaggcccctcgtgttacaacctcttagccataagaaagcaggtggttgtcaggccatacctgccgtgtcacctctcacaggtgctcctctcacaggctgctccatcagtccagatgcccacgtcatgcttcttgacttgggtagtacatccttgaacttccacttttataatttaagctatacatttaggttcatgtgcttttccatgtatgtattatagttcacaatgaaaagggttttaatatgcagctgggtgcggtggctcgtgcctgtaatcccagcactttgggaggccaaggtgggaggatcacttgagcaggagtttgagaccagcctgggcaacatagtgagacctcatttctattaaaaaaaaaaaaaaaaaaaagtattggccagccacggtggctcacgcctgtaatcccagcactttgggaggctgaggcgggtggatcacttgaggtcaggagttcaaaaccagcctggccaacatggtgaagccccatctctactaaaaatacaaaaaattagccaggcgtggtggcgtgcgcctgtagtcccagctgcttgggaggctaaggctggaggatggcatgaacccgggaggcgcagcttgcagtaagacgagatcacgccactgcactccagcctgggcaacagagccagactctgtctcaaaaaaaaaaaaaaaaaaaagaagaaaaagaaaaaaaagtatctgtatatatttttatatatgcttttttttctggaagaatacaatgacagattgttaatatggagtctttaatattttgcttactataattccatatttaaataaacaattatttatctttttatctttttttttttgaggtagggtcttgctctgttgctcagagtggagtacagtggcacaatcacaactcactgtagcctcaaccttctagcctcaagcaatcctcccacctcagcctcccaagtagctgggactacagatgcacactgccacgcctggctaatttcttatttgtttagttatttttttgacacagagtcccactctgtcccccaggctgagtgcagtggtgtgaccatggctcattggagcctcgacctcccaggctcaagcaatcatcccgcctcagccttccaagtcgctgggacttcaggcatgcaccaccatgctcagctaatttttgatttttttgtagagatgaggtcttgctattttgcccaggctggtctcgaactcacagatgcaagcaatcctcctgcctcagcctcacaaagtgctgggattataggcatgagccgccatggccggccaacaattatttttcaaagtctggaagatgacaggaaaacccaagactgaccctagaagacagagacaccatcacggcctcagctgtgtccagatttcaacatgtagctgtttccctcctagacaacaaccttcctttccagccttcactccaaagtatcaattactcacagggttttaaactttgggacctgatcattgctaggtctttgccaggctttgtacactccaggtgctttccagatttagatgatgagctgagagtgaagagaagggctggtcccccagctaaggtaggggatgggagtaaggaaggagtaagaggacatatttttttttttgagacagagtctcattctgtctcacaggctggaatgcagtggtacaatctacaacctctacctcctctcccctggcctgggtagagcctggcttcctgtcccctaccctagctgggggtccagcccttctcttcactctcagcttatcacctaaatctggtaaataggccaaagaaagtatggcttttttttttttttttttttttcctgggactagaagattagaataggaaatccatatcacaactcctgacaccagagaaaaacaagctcctttgggtaaagatgagaagaggcattcggtggagtagctgggattacaggcgtgtaccaccacgcctggctaatttttatatttgtagtagagatggggtttcaacatgttggccaggtgagtctcaaactcctggcctcaagtgatctgcccgcggtggcctcccaaagtgctgggattacgggcatgagccaccacacccagccaggatatacctaaaaaaaaaaaaaaaagtttcaaggccaagcatggtggctcacgcctgtaatcccagcactttgggaggccaaggtgggcggattgcctgaggtcaggagtttgaaaccagcctggccaacatggtgaaaccccatctctactaaaaatacaaaaactagcctggcgtggtggcgcatgcctgtaatcccagctactctggaggctgacacaggagaattgcttgaacccgggaggcagagcttgcagtgagccgaggtcgtgccactgtactccagcctgggcaacggagggagactctgtctcaaaaaaaaaaaaaaaaaaaaggtttcaaacacaattaattcaaaccaacctcccttaaaagggaaaaaaagccagcattttccacgggagacagagatttgaaaaatgaagctgtgttcgtgtctcctaactcagctaggtcagcagaagggtgggcaatggggaagcaatcaggtggtttttttaatcctcctgcctcagcctcccaaagtgctgggattataggcatgagcctactgcactcacctggctagagtgcggtagcatgatcacagctgactgcagtctccacctcctgggctcaaggatcctcccatcttagctccctgagtatctgggaccactggcacatgccaccatgcctggcttaattaaaaaaaatttttttgtagatggggtctcactatgttacccaggctggtttcaaactcctgagctcaagagatcctcccacctcagcctcccaaagtgctgatattacaggcgtgagccaccatgcccaacccagaaccaggtttaataactgtagaggaggcaacggtgataggcagtctaagcagcaggtggaatgatactgttaaatgacatcaagttcatctgagtgtgggtgggaacttagtataatagattttaaagggatcactctgactgctgtgctgataagtgactattttatgttgataatatactgagataaaaatgttatggtcacgaaataaaaactgattgctgtaaaatgtgaaaaagggtccttggacattaaaaccatgatagcaagtaacagagctgggtgtggtggctcacgcctgcaatcccagcactttgcagggccgaagcaggcagatcacgaggtcagaagatcaagaccatcctggctaacacggtgaaaccctgtctctactaaaaatacaaaaaaattagccgggcgtggtggcacgcacctatagtcccagctattagggagactgaggcaggagaatcgcttgaacctgggaggcgggggttgcagtgagccaagatcaccccactgcattccagcttgggcaacagagcgagaatctgttccaaaaaaaaaaagaaaagaaaaaaatagtaacagaagagtagaaggctgggtatagtggctcatgcctgtaatcccagcactttgggaggccgtggtgggaagatcactttgaggccagtagtttgagaccagcctgatcaacatggcaaaaccccgtctccactaaaaatacaaaaattatctgggtgtggtggcacaggcttgtaatcccagctacttgggaggcttaggcaggagaattgcttaagcctgtgaggcaaaggctgcaatgagctgagatcgccccactgcactccagcctgggcaacagagtgagactctgtcttaaaaaaggaaaaacaaaaacaaaaaacagtagtggaaagtataacagagggctgcacagtggctcatgcctgtaatccagcactttgggaggacgagacctgaggtcaggagttcgagaccagcctggccaacagggcaaaaccccatctctagtaaacaatacaaaaattagccaggcatggtggcacgtgcctgtaatcccagctacttgggaggctgaggcaggataatcgcttgaacctggggggcggaggttgcagtgggctatcgtgccactgcactcctccctgggtggcagaagactccatctcaaaaaagaaaagaaaagaaaagatgacagaggagttgaaagaaaaaaactgaggaaatcttccacaaaggagatcaaaaagacaaaatatggaaaagagacaaaaatatgaaaaatagaaaaggactgacatctaatgaaaaaattccagaaataggaaaccaaggtatgagtgaaataaattatcaaataaattaatttcagaaaattccctaacactaaaggacatgagtttccagactgaaagggccaagagcacctggcacaatgggtaatgggtgctgaatagaaataggccaacagcaggacatgcattgtgaaatttcagaacactgaagacaattctacaagcatcgagagagaaaaatgacgacaaaggaggaaccaagaatcagaagtcacgcaggaagccagaaggcactacagtcacttcctcccctcagagggacaatgggcaggaagaggacagggcagcagcctcctttatggagagagttctttcagatgaaacggatgggagactaggggatatatacaaatggggtcagtttgggcttaactagagacagatacatagaaaatcatgcaaataaacatgattattaactccaatgagaaactaaaagttgtgtcagaaggaaaagaagtcatactaagtgttctggttcagctatgaatagcgtttgtgtatccttagcaatatcaatattaatattgatccaaccaaaatgacacaattatatggacaaatggagggactgaaagcacgtgtctgcgatgaaggatgaccaaagagcagcccaatctgcaccactagatatagtcaattgataaggcctaatactgaacaattgtgaaatggtaataaaaatatttcacatggaaatgaaagttaatactaaaatattcatctggaagaactgaaggtggttgtctcttggagagaaaggaaagaggggttgccaagaactactgattttcatgataagccttgttgaatttttttttaggcagggtctcgctgtcacccaggctgaagtgcagtggcgagatcatggctcactgccgccttgaactcgtggactcaagcgaacctcccacttcagcctcccaagtagctgggactacaggtatgggtcacagagcccagctaatttttttattctttgtaaggatttttgttgttgttgttattttgttactgttttactgttttttgtttttttgagatggagcttcgcccttgttgcccaggctggagtgcaatgggctcacggcaacctctgcctccccggttcaagtgattctcctgccttggccttccaagtagctgggattacaggtatgcatcactacacctggctaatttttgtatttttagtagagatggggtttcaccacgttggtcagactggtcttgaactcctgacctcaggtgatccacccacctcggcctccaaaagtgctgggattacaggtgtgagccaccgcacccagctggtattgctatttttgttgttttttttctcccaaatatctttgatctgcagttggttgaatctacagatgtggaacccaaggatatgatgggctgactgtactcatttattaatattacttattatatttgttcagttatttcaaatatggatctatttctacataagtatattgcaaacttctggaggatgggcatggtggacgattcctttttgatacctaccaaagctatgtccgtagtagatgcccccaaaataattcatggataaacataaaggtcaaattcaaggtgacttgatatgcaaagttaagtcaaagtctggagataaaaaccaaggttagattaaagctgacactgtaaatagttaagacatttggagaacctaagtacatcaagacagagctgcattcaaagttctgtggtctacttttttggttaatgtttatttgttttaatgaagagatacttttgttcccaaagtactctcaagtttcaagttttggtgacctgggacttggtatataaacgtgagcttactctgccaacaccctatgtgactttcgagactttgtgcctgcctcctttgttttcctagattgcaaagtcgtaatctccacacactgagatactgaacttcttttattgctggtctgatacgattgacaagagagagattagtttcttgtcccttgctggaggtggggagatgaaaacaccagggagaaaaatatagtggaagatcatcttgagtcgatgttcagaatgaggagtcctcgatcctgggccagcatcagtccatggcgcttttggtctcactgtggtttcactccccattaaatggggaaaatacttggcattttctgacattccgggttctacatatgcatatcagtaaatgtaatacacacgttaagagaaaggcaggccaggcacggtggctcacgcctgtaatccctgcactttgggaggccgacgcaggcggatcacctgaggtcgggagttcatgaccagcctgaccaacatggagaaaccctgtctctattaaaaatacaaaattagcccaggtggtggcacatgcctgtaatcccagctacttgggaggttgaggcaggagaatcgcttgaacccggaggcagaggttgcagtgagctgagatcgcaccattgtactccagcctgggcaacaagagcaaaactccgtctcaaaaaaaaaaaaaaaaagagagagagagagaatgaaaggcaaaaatcacatgatcatctcaatagatgcagaaaagcatttgagaaaatctgacatcctttcatggtaaaaactctcaacaagttaggtatagaaggaatgtactttgatgtaccttggaatttaccttgcatgacaaattcgcagtgaacatactgaaagctcttccactaacaccaggaacaagacaaggatccccactctcaccacttatatttgacatagtaatggaaatcctagccagagcattaggtgagaaaaagaaatgacaggcctccaaattggaaatgaagaagtaaaactgtctctatttacagatggctgatcttatatatagaaaaccctaaagacaccaccaaaaacctgttagaactaaataaagttgtaggatacaaacgttaacatataaaaatcagtagtgtttctatacattaacgaagaactattcaaagaaaaaaaagaataagaaaacctccattttatttcctattttattttaattttgttattttgtagagagagggtctatgtcgcccaggctggagtgcagtggtgcaattttggctcactgcaacctccacctcctgggctcaagctatcctcccatctcagcctcctgagtaactgggactacaggcacatgccaccatacctggctaatttttttgtagagatggggttttgccatgttgcccaggctggtcttgaactcctgggctcacgcaatctgcctgcctcagcctcccaacgtgctggggttacaggcatgagccactgcgcctgatttatttatttatttagagatggagtcttgctctgtcgcccaggctggagtgcagtggcaccatctcggctcactgcaacctccacctcccgggttcaagtgattctcatgcctcagccacccgactagctgggattacaggagtacaccaccatgcctggctgatttttgtatttttagtagagacacagggtttgccatgttggccaggctggtcttcagctcctggcttcaagtgatgtgactgccttggcctcccaaagtgctgggattacaggcatgtgacactgcacccagcctaaaaggtcccatttatcaaagctatataaaatgtaaaatacttagaaataactctgatatcccaaaacaggggaaacttggagcgatcaacaaatccgatcagtgagctttttttttcccctttttcctttgtgagatggagtctcgctctgtcgcccaggctggagtgcagtggcacaatcttggcttggctcactgcaacctctgcctcccgggttcaagcgattctcctgcctcagcctcctgagtagctgggattacaggcacgtgccaccatacctggctaatttttgtatttttagttgagacggcgtttcaccatggtgctcaggctggtctcgaacttttgacctcatgatccgcctgcctcggcctcccaaagtgctgggattacaggcgtgagccaccgtacctggcctttttaagtgacaaggtctcactctgttgcccaggctggagtccagtggaccatcacaggtcactgtagcttcaaaccctgggctcaactgatcccatctcagcttcctgagtagccaggattacagacacacaccaccacacctggctaatttttaaaaaaaaatttttggccaggcatggtggctcacgcctgtaatcccagtactttgggaggctgaggcgggaggatcacgaggtcagcagtttgagaccagcctggacaacatggtaaaaccccatctctactaaaaatacaaaaattagtcaggcgtggtggcacgtgcctgtaatcccaactactcagaaggctgaggtaggagaatagcttgaacatgtgaggcagaggttgcagtgagctgagatcccgccacggcactccagcctgggacagagctagactccatctcaaaaaaaaaaaaaaaaaaaaaaaatttgtacatctgctgcccaggctggtctcgaactcttggcctcaagggatcctcccaccttggcctcctaagtagttaggactacagttgctcgccaccatgcccagtgccatcagtaagctaaggcttacacttttctgatcacagctacagggacagctggtcttactgcccaggttcctcatggtcacctcctatttcctaatgtaagtcatctcctcacaactacgggcaaaggggcactgcttttcttcaactctaccaggccacagaccctcccaggatgtgctggtgattttgctgctgccattagttcagctgtggggcaaaagcagcgcggtggatggtggtctcagggcaaactctgtagacattaattctagagaaaaccctctggaaggattagcatcttagccaagaaactttaaccctcaggttggagcattttctagttggctcttcttgtgttagtgagaggaatgaaagaacggaggcattagagacccacggatggaggcaagccagcacctccagtgttcggagtaaactcctgaggcaccaggcctgcctcccacagaaatcgaaagaaaacctatcctgcctctcactgggtcataaattacacatcgtccccttccctgagccttcagggaaccgaagcatgttccactcctgccaccgaccttcctcatctttgggactcctgtctcgatttctcactgatcacaaaaaatgatcttcacaaagtcttcctgcattgtttctctgccatttctatgaagcttctgcagactttgggagttactgtcttagctagagaataatagtggatcaaagaggacagactataccctctaagtgcccccacacccagggccacccattggcactgcctgaggaggtccagtctcaaggtgaggagatggactaggagggaaactgggcccccatcagtcagcgcttctcagacactgacatgcaactaacaggtagggttcttgacatacagggctcttgctacaatgcagataccgatttaggagaggagcccaagattctgcatttcaaatttcccaagtgatgttgatgctgccggtccacagaccagactgcatttgcatagcaaggagcaagactgaggggaggtgaaaaaatagaggaaaaacaagctccatgagaggcgatctgatgatgctccagatctaaaacctcttgtcttcaaggacttccctgcagggcctttcactttttccagaggattggagcacacagccttccaggcccagccacatgctggtaaagggccaggggcctgagacctcctcacaccctccgtcagcagctgtcagggagaggagccctgcctgggctggcaatcaaccctcgctcctgccgctggctctggggtggttctgccatggaacagcaggttcaagatggcaacagggtaacagatggtctctcttccctccacctctgcctcatcccaggctctgctccctgaagccaaagcagtgatcctctttactttctcaaacagcagcttactttgtgccaggctgtgtgaaccaccatctggaactgtttttatttaatcctcacaatcaccttgtgaggtaggaattgttctatccccactttagaaggaaactgaggccccatcactgaactacatacctgtgaggccaggagcctatgggactgaatctaggagagaagcctcaggataggaacttaatgaaaaatcaaggcaactaaggtgcattgattggtataggacccttcaaaggtaagcagaaagccagtgctgttactgtccttctaccaggttcccttaccatacaccagtggcaggaggttctcctgtgccagctggtacaggtaggtcatgaactgggctccttggcctgggcagagggtgccaggcagaggcatgactgaccaggcagcaccaactgtgtgaagagcagctggcctgctaggcagctggtggaaggccatttaggagtctgacgtaaatgtaggtaggtacttgcctacctatccatacctcaaaggaacatggtgtcctgggatggaaatgcacacgattccagctcttcatttgataaacctaagtgcccacaagcactgtgctaggctttgtgggagggtttaaaacacagtctttgcccttagtgaggaaaattagcatgctggatataaaagagtggtggaaactttagtgaactggagaatgctactcagctaaaacttgtactaccttactttagttggctggagcctctctgcaatgaaggactacctgatttttcaagtcccaaatcaagatcatgtgaacatttccctttttagaaacgaaaagaacttggggataggtggtcagaaaataaaatggaacaattcaaaaaataaatcctcaaacgcaggccaacatgtggctgctagtttgcaacctgtgctcctcattaccccagtcctatattttcctgttgtacctccagcacctcacaattcctggcagaacagaagtgcctctggtatgaccacgtgaagctcaaccaagagacccaccagagtggcaacggatctgaaatttccatcatatgcagaacagctgaagcaactggagagggtttttagccttggaaatgactaacaggaggcataagagttgttgcaaataagaacatcctttaaaaaagttaggatatatagtctggtcaacactttggagtggggaggaggttactttcaggtaaaatatacatctgacaactgaccacggttccccaactacttctactgtccatacccacctcccccatttcttcactggcccagtacctaaaagcatttggctgtcatatctggtaaagggaattcaggctttgccttataatttttttttgttttattatttttttgagacggagtctcactctgtcaccatctggagtgcagtggtgtgatctaggctcattgcaacctccacctcccgggttcaagtgattctcctgcctcagcctcctgagtagctgggatataggtgcccgccaccacacccagctaatttttgtatttttaggccaggctgatcttgaactcctgacctcaagtgatccacccacctcggcctcccaagtgctgggattacaggcgtgagccaccgtaccaggcccaggctttaatcccaaatatctcacctacttcctacctaagaatcttatctaactcaggattttttttttttttttttttttttttgagacggagtctggctttgttgcccaggctggagtgcagtggtgcgatcttggctcaccgcaaccttagcctgccgggttcaagcaattctcctgccttagcctcccaagtagctgggattacaggcatgtgtcaccacgcccaactaattttgtatttttagtagagatggggtttctccatgttggtcaggacggtcaaactcccaaactcaggtgatccgcccgcctcgggctcccaaagtgcggggattacaggcatgagccactgtgcccggctaactcaggatttttctaaggattaaaatgagatatgtaatgaaagtatttggcagaatatctggcaaaggggtcaagaaatgttcaacattattatggaggtttagatcttttctcccgtccgagtactaaccaggcctgacccggattagcttccaagatcagatgaggtcgggagcattcagggtagtatggccgtagaggtttaggtcttttctataaaacaccaaataatacaactatggtcaaaacacagaagttgcagggagtctgattttggcttcataaatgatacttctgtaacaatgccagctggaatgagattacaagtgtgaatgttcaaacagagcagcaaaggtcattcctcaggggactctggaggagattcctaccccaggtaggaagttggttgatttctgctctgatcctatgactactaaatgcatagtatgaaaaactacacttataatgtgcattaacaagaatatgactgatctccatggatatggaaagatatacaaaatagaattgggggggggaaattatagaaccatacaatgggagcccaagttttaaaaaccagatatatatttatgtgcttagagcatttcaggaagggtatattaagaaatttatttggaaaatcttgagaggtaagctggagtgaatgtacactctccactccatgcccaaatgtttacttttcactttatacccttctgtttatttttttgaccagcagcatcaactttttaaaaaaggaccaaataggccaggctcagtagctcatgcctataatcccaacactttgggaggcaaaggtgggaagatcacttgagcccaggaattcaaggctgcagtgagaaatgactgtgccactgcactccagcctgggcagtagagcaagactctgtctcaaaataaataaataaataaataaataaataaataaataaataaatcaatcaatcaataataaataaaaaaaccaaatcatttggttggccaaaaccttctgatctgagctttgctcggcaaccactctccaagataaagctttatgtatcacctcacatattcactgtcaaggctcaggcactctagattactggactccccagtcaacattcccattaccaaaagtccctaatcttggaggctgcttcaggtcaccctctctttgtccctcacttcctgagttttttttttttcctccaactatactcactctactggtgatctcaaacagccctctagcttttaagatactgtccaaatgctgactcccaaatttctatttccatccaagacccactcttaaactctagacacacacatgcatcgcaactgcctcctcaacagctccacttggatattgagtagacatctaaaacttgctcttcccacagccttgcaactcagctgatggcatgtccaggcttccagttgcccaagtccataacctcagagttagggaaagttgagtgtgacccacaatgccagctacctagaaactaaggtagatctaggtactgggattaaagatatcataaaatcattaaaatgttttctgaaatgtttgaagttaactcattttatttctaggatttggatttcaacattttaatttctttggaatataagtcactttttgcaagctaaaaaatagaatcaaactaaggtgatctagtcctctaggcatccaggctgatccttggaatcatgagcagaatgatgacatactacaaggtgctagcaatacggctataaactctaaataataaccactacatgtttcattaggaaacagccaaaagtccggccgttaaaggaataatctgcagaacatcttgatttacaagggacaaaatgatgcaaattatatgctgtccaacctactggtgaactggatcagaatggtccaaggactgttaaacagaggaagtatttacattttgaaaacttgctctgcaggataaaaaaattcctggttgctgtcagtaagaaagcaagtaaaaaaaatattacagatgaactcactgatctttgattttactaaggtcttccactggaacatgaaggtagggataagtgtacaggataatatactcagatatttttaaaataaattacttaataataagaaattagccataccacattgttccatttgctacaagaacaaattggcaatgaagactatttaaaagaaatgctcagctctacagagggtggtggcaggcaacacttttccattacagaataacctctattcttccatgatacatattcctgtggaaaaacttgtcagggcccagggatgaaaaatagagcttgtcctaattagctaactgtaggttcacttaacatctttgggaaggacccaaaaaatctggccattattttcttaaacatctgcaagctgcagaattccttagtcctcagctatagtttctgctagatatcttaaagctgggacagttccactgtgactcctcctcagctatggggtgggtgctagtcatcaaagtctggaatgtcatcataggagtaaccacggtagcctttggatgcatagtaagcgatgcgcaggtggtaaaatccgggtaggaacaccagaatgccaatgatcagcactggaacggcccggtctgccccctggtggcagaaggaggcaaacacattagtaccgtaagagttacacattttaaaataaaacgtcacagacctaatccttagatcagtattttatactcttcagtactttttctttgagttgtataccaccaagggaaaaggtttcctcctgattataaattgaagacaaactacaaaatattaacaattataaagaaaaaaatgacccattctcatccagatattttggcttcttttcctttttttaaagctcttagttgtgaacacaccatactctgtgtcctgtggccaatattattaaaaccttttcatacatttaaactgtaaggatgtgtaacattccaccgaaatggacatactacagttttacctaactgccccacatacagctgctggacactttggttgtttttcaccttttgtaattgtacagataccactacaataaactctgtgtttttctcagcctttcaggttttcttttctttctcttttttctttttttttgaggtaagagtcttgctctgttgctcgggctggagtacagtggtgtgattacagctcactgcaacctcgacttcccaggctcaagtgatcctcccacctcagcctccaagtagctggagttacaggtgtcagtcaccatacctggctcattttgtacatttgtttgtttggtagagatgaggtctcgctatgttgcccaggctggtctcgaactctggggctcaagcaatcctcctgcctcagcctcccaaaatgctagaattataggcttgagccactgcacctggctggctgtgttccctgttgtgtgttaattatagtcagaattggttcaagacaacttggacactgtgtatgtggggacagcccatgagaaagaaccaccaactactttaggtttctaaggtttcatattgaagctcaacaggaactccaaccaaacctactgtaagaaggaactgacttacgaggcacagtgaccccacacatataacagaattgctatttctctccaaatactgacagtatgtccatggcactgcacagctacaatgacagcatgctgctccagctacagccctttaccaatcaggactcctgtatgccaggctcagccatgttgttccaaactatgacagggcaaactgtctaatatctcagaggccaagtttgcctacctgccaccacctcccctataggaactatggaagtttactgttgctcaaaggaagaaaaacatgttttgccaacagagaacaaaatgtaaaagaaaatctttttggtttttctgctggaatctgctgtaccagacatgaatataaaaacaaagattgaacaatgaaaaaaatctaaaacctgaatagacaaagagtaatgagattaaggccataataaaaagtctcttagcagagagaagcctgggactagatggtttcgctgctgaattataccagttaaagaattaatacttggctgggcatggtggttcactcctgtaatcccagcactttgggaggccaaggcaggcagatcgcttgagctcaggatttcaagaccagcctggtcaacatggtaaaatcctgtcttgacaaaaaatacaaaaattagatgggcatggtggtatatgcctgtggtcccagttgctagtgaggctgaggtggcaggatcacataagccggggaggcaaaggttgcagtgagctgagatcgcaccactgcactacacctgcatgacagatgagaccctgtctcaaaaaaaaaaaaaaaaaaaaagaatactaatcctactgaaactattctgaacagacatggagagaatacttccaaactgattctactaggccagttttaccctgataccaaaactaggcaaagacacatcgaaaaaacaaaaataggccaatatccctgatgaacattgatgcaaaaatcctcaataaggaggataatactagcaaactgaattcaacaatacattaaaaagatcattcatcaggaccaagtgggatttatcccagagaggcaaggatggttcaacttatacaaaccaatcaatgtgataaaatcgtatcagcagaatgaaggacaaaaaccatatgattatttcaatcgatgctagaaaagcatttgataaaattctacatccaccgggtgtggtggctcacgcctgtaatcccagtactttgggaggctagggtgggcctcacactgaccataattaacacacaacgggaaacatagtcagaggggtgcagtggctaaagcctgtaattccagcactttgggaggctgaggcaggaggattgcttgagcctaggagtttaagaccagcctgggcaacataatgagatctcatctctaccaaacaaacaaaaaaattagctaggtatggtgactcacacctgtaactccagctacttgggaagctgaggtgggaggatcgactgagccctgaagattgaggttgcagagagctgtgatcacaccactgtactcctggactgcttgagtctaggagttcgagatcagcctgggcaacacggcaaaacctcatctatacaaaaaatgaaaaaaaaattaaccaagtgtggtggcacatgcctgtggtcccagttatttgggaggctgaggttgcagtgagccgagatggtgccactgcactccagcctggatgacacagtgagattctgtctcaaaaaaaaaaaaacaaacaaaaaaaccaaaaaacaaaaaaacatacactggggaaagaaccagtcttttcaataaatggtattaggaaaactggatatccatatgctgaagaatgaaactagacccctcaaatctcttgacatatacaaaaatcaaatgagaatggattaaacacttaaatgtaagacctaaaactatgaaactactataagaaaacatgggggaaactctccaggatgctggactgggcaaagatttcttgagtaatgcccccaaaagcacaagcaaccaaaacaaaaacagataaatgagatcacatccggttaaaaagcttctgtacagcaaaggaagagacaacccacagaatgggaaaaaatatatgcaaagtatccatctgacaaggaattaataaccagaatatataaggagctcaaactctgtaggaaaaaaaatctaataatccaatcaaaaatgggcatttctcaaaagaagacatacaaatggcaaataggtatatgaaaaggtgcttaacatcattgatcaaagaaatgcaaatcaagactacaatgagatatcatctcatcctagttaaaatggctttttaaaaaatatagacacaaggtctcgctatgttgcgcaggctggtctcgaactcctgggctcaagtgatcctcctgcctcggcctccaaaagtgctgggactacaggcgtgagccactgcacccagccaaaatggcttttatccaaaaaaaacggcaataacgaatgctagcgaggacgtggagaaaagggaaccctcgtacaatgttgatgggaatgtaaattagtatagccactatggagaacagtatgaaatagaactaccatatgatccagcaatcacagctaggtatatacccaaaagaaaggaaatcagtttatcaaagaggtatctgcacttccatatttatgacagcactattcacaacagccaagatctggaagcaaccaaagtgttcttcaacagacaagtgaataaagaaaatatggtacatatatgcaatggagtactattcagccactaaaaagaatgagatcctgtcacttgcaacaacatggatgaaactggagaacgttatgttaagtgaaattaagccaggcacagaaagacacactttccatgttctcactcatttgcgggaactaaaaattaaaacaattgaactcatggatattgtagaatgatggttaccaaaggctgggaaaggtaggggggaatggggaaggttaacgggtacaaaatatagttacatagaatgaataagctctagtatttgatagcacaaagtgactagagaataatttattgtacatttaaaaatataataactaaggctggacgtggtagctcacgcctgtaatcccagcactttaggaggcccacgcgggcaggccgcttgaggtcaggagttcatgaccagcctggccaacatggcaaaaacccatctctactaaaaatacaaaaataagccaagtgtgctggcttgccaccatagtcccagctaactcaggaggctgaggcaggagaatcacttgaacccacgagccggagtttgcagtgagctgagatcctgccactgcactccagcctgggtgacagaacaagactctgtctccaaaatatatatatatgtatgtatgtatgtatgtgtatatgtatatatataactaaaaataggccaggcacagtggttcatgcctgtaatcccaacactttgggaggccagcctgggcaacatggcgaaaccccatctctactaaaaataccaacattagccgggtgcggtggcgcacgtctgtaattccagctactcgggaggctgaggcacaagaatagcatgaacctgggaggcggaggttgcagttagccgatattatgccactgcactccagcctgactctgtctcaaaataaataaataaataaaagtataattggaatgtaatacaaatgatgaatgcttgaggggatggataccccatttagcctgatgtgattattatgaatgcatggctgtatcaaaatacctcatgtatcccctaagtatatacacctactatgtacccataaaaattggaaaaaaaattggccaggggcaatggttcacacctgcaatcccagcactttggaaggctgaggcaggcagactgcttgacctcaggagttagagatcagcctgggcaacatagtgaaaccctgtctctacacaaaataaaacaaacaaaaataagtaaataaaaaataaaattagctgggtgtggtggcacacacgtgtagtcccagctactcgggaggctgaggtgagaggatcgcttgagcccagggaggtaaaggttgtgccactgcactctagcttggatgacagagcaagaccctgtctcaaaaaaaacagaccactgggacggacaaacacacacacacacacacacacacacacacacacacacacacgcacactagagccttggctaacattttaaaaatctcacaacttattcccacatgcccgtcagcttacccctttgctgatgtagcctgacagcaggagggagcctataataatgagaaaggcgccaatcaaaaacagcacagtggcaagtgcgatggccttataagggatcttaggaggggttttcttaaactggaagagaaatagagatgaaaaagacaacgaagaacattaatgcaaatacctgggttcaaacatttaattaattatttgtaatttttatgtttttgtttgtttgttttgagatggagtttcgttcttgttgcccaggctagagagcaatggcgtgatcttggctcactgcaacctctgcctcctggattcaagtgattctcctgtctcagcctcctgagcagctggggttacaggtgcccgccactacacccagctaatttttttggtatttttagtagagacagggtttcaccttgttgacctggctgggcttgaactcctgacctcaggtgatccgcccgcctcggcctcccaaagtgctggcattacaggcgtgagccaccgcgcccggcctaatttttatgattttagagacggagtcttgctctatcacccaggctggagtgcagtggtgcaattacagctcattgcagcctcgaactcctgggctcaagcaattctcttgcctcatcctctcaagtagctgggactacaagtatacgtcaccatgcccagctaatttttaaatttttctgtagagacgaggtctcactatgttgcccagggtggtctccaactcctgggctcaagggagtccttccacctctgcctcccaaagtgctgggattacaggtataagccatcaagcccagtctcaaacactttaaaacagggaggagagctcgcacctgtaatcccagcaatgtgggaggctgaggcaggcggatcacttgagttcaggagtttgagaccagcctgagcaacatggtgaaacctcgtctctacaaaaaatacaaaaattagccgggcgtggtggcatgtgcctgcagtcccggctacttgggacgctaagctgggaggatggcttgagcccaggaggtgaagaggcagcgagctgagattgcaccactgcactccagcctgggtgacagagccagagcctgtttcaaatacaacaacagcaaaaacaggagggtaattaagaaccaaactagatactttatgtgtcttaagtatgtcctaccacccagtgcagctctgagaaataaaagggactggcaagagatgaagctctagttattgctctcacagttactcaaaggaatctcagaggaatgtcattcactctagttcgaatctcattccataaatcattcattgtatcataagaaacttttctttaaaacaaaaacagaaatgactttacagtcattcatttgttagatatatatttattaactgcctggcacatagatggctgtactaacttatggggatttaagagatcctgtctctacaaaaaattttaaaattagctgggtgtggtggcacatgcttgtggtcccagctattcaggaggctgaggtgaaaagactacttgagc

SEQ ID NO: 20 - DNA, 4523 bp, homo sapien
atgagaccccggggagcagcgtttgcagcgggcccgccaggtgacctgcacctgggcaccgccatcggcttcgcaggggccatctggaggagtcggtcacccgccatgtcgaccttgctggacattaagagcagcgtgctcaggcaggtgcaggtgtgcccgtccttccgccgcaggactgagcaggacccagggagtgccagcgccgacccgcaggagcctgccacgggggcctggaaacccggggatggcgtggagttctttgcccacatgcgcctcatgctgaagaagggggaaggcagacagggcttgccgtgcctcgaggtccccctgcgcagtggctcgccagcacccccggagcctgtggatcccagcctcggcctgagagccctggccccagaggaggtggagatgctctacgaggaggccctgtacacggtgctttaccgcgcgggtaccatgggccctgaccaggtggacgacgaggaggccctgctcagctatctccagcaggtgtttggcaccagccttgaggagcacactgaggccatcgagcgagtgaggaaggccaaggcccccacgtatgccctgaaagtctctgtcatgcgtgccaagaaccttctggccaaggaccccaacggcttcagcgacccatactgcatgctgggcatcctgcctgcctcggacgccacgcgggagccccgtgcacagaaggagcagcgcttcggcttccgcaagggcagcaagcgcggtggacccctgcctgccaagtgcatccaggtcaccgaggtgaagagcagcaccctgaaccccgtctggaaggagcacttcctcttcgagattgaggatgtgagcacggaccagctgcacctggacatctgggatcatgacgacgatgtatccctggtagaagcgtgcaggaagctgaatgaagtcatcggcctgaagggcatgggcaggtacttcaaacagatcgtcaagtcagcccgcgcaaacgggacagcaggacccaccgaggaccacaccgatgacttcctggggtgcctcaacatacctgtccgggaggtgcctgtggctggcgtcgaccgctggttcaagctggagccacgctccagtgcctcgcgtgtgcagggacactgccacctggttctcaagctgatcactacgcagagggatacggccatgagccagcgcgggcgatccggcttcctgtcccacctgctgctgctcagccatctgctgcggttggagcactcagcagaggagcccaactccagcagctggcgaggagagctcagcacaccagccgccaccatcctctgcctgcacggagcccagagcaacctgtcacccttgcagctggccgtgctgcactggcaggtcagcagccgccaccatcaaacctgcacgctggactacagctacctgctggggctgctggaggacatgcaggcacactgggaagaggctccttcactgccccaggagcaggaggagagcctggctgatagcctttccgccttctctgagttcgggctgcagctgctgcgccagctccgagactacttccctgccaccaacagcaccgctgtccaccgcctggagctgctgctgaagtgtctgggcaagctgcagctcttccaaccctcctttgagatctgccccttcgagtcggagctgaacatggacattgctgcggccctgaagagaggcaaccgtgagtggtacgacaggatcctgaatgacaagagtccccgagagcagccaggaccacagcgcctgcctgggctggttgtgctggctgacgccgtctatgatgaccttcagttctgctacagtgtgtacgccagcctcttccacagcatcctcaatgtggacgtcttcaccctgaccttccggcagctggagcgtctggtggctgaggaggcgtgggtgctgacggaggagctgagccccaagatgaccctggaggtggcctcggggctctttgagctctacctgaccctggctgacctccagcgcttctgggatagcatccctggccgggacagccgctctctggccctggctggcatccacgcccccttcctgcctgctgtgaagctctggttccaagtgctgagggaccaggccaagtggaggcttcagggagccgtggacatggacacgctggagcccgtggacgcctcctccaggcacagcagctccgcagccactgctggtctctgcctcagccacatccaggagttgtgggtgcgcctggcgtggcctgaccctgcccaggctcaggggctgggcacccagcttggccaggacgtgtgtgaggccaccctcttctatacggagctgcttcggaagaaggtggacactcagccaggggcggccggtgaagcagtgagcgaggcgctctgcgtggtcctcaacaatgtggagctcgtgcgcaaggctgctgggcaggccttgaagggcctggcatggccagagggggccacggggcccgagggggtgctcccccgccctctgctcagctgcacacaggccctggacgatgatctgcaacgggaggcccacacggtgacagcgcacctgacctctaagatggtgggcgacatccgcaagtatgtacagcacatcagtctctcgcctgactccatccagaacgatgaggccgtggccccgctcatgaagtacctggatgagaagctggccctgctgaacgcctcgctggtgaaggggaacctgagcagggtgctggaggccctgtgggagctactcctccaggccattctgcaggcgctgggtgcaaaccgtgacgtctctgctgatttctacagccgcttccatttcacgctggaggccctggtcagttttttccacgcagagggtcagggtttgcccctggagagcctgagggatggaagctacaagaggctgaaggaggagctgcggctgcacaaatgttccacccgcgagtgcatcgagcagttctacctggacaagctcaaacagaggaccctggagcagaaccggtttggacgcctgagcgtccgttgccattacgaggcggctgagcagcggctggccgtggaggtgctgcacgccgcggacctgctccccctggacgccaacggcttaagtgacccctttgtgatcgtggagctgggcccaccgcatctctttccactggtccgcagccagaggacccaggtgaagacccggacgctgcaccctgtatacgacgaactcttctacttttccgtgcctgccgaggcgtgccgccgccgcgcggcctgtgtgttgttcaccgtcatggaccacgactggctgtccaccaacgacttcgctggggaggcggccctcggcctaggtggcgtcactggtgtcgcccggccccaggtgggcgggggtgcaagggctgggcagcctgtcaccctgcacctgtgccggcccagagcccaggtgagatctgcgctgaggaggctggaaggccgcaccagcaaggaggcgcaggagttcgtgaagaaactcaaggagctggagaagtgcatggaggcggacccctgagtccatcagctgccagccccggccctggcccccaccccaagttccctgaagcatcctccagctcactgtggccagctttgtgcaaccagggcccacggcgcccctcctgtgctgtgacgtgtgtgtcgtggctggccccgcggcgcctaccgccctggccgtgtctgtctggtgtgtgctgtgaacccctgcacccaaccccacatctgggtggccaacttggcaggacttggccagcagctgcccaggacacagtgcaggccagagcgggcttgaccacctggtgggcctccctgcccgcttccttgggctccccggccctgggtgggcggtgggcagctggtctccagggactcagtgagtggctgtgctctctgcacaacgggcaatgtgcagacgcatttttggtaatcacagctggggagtgaaaagggtgccactggcaccactgggtggatggtccagagcctccacccacagaggggatgcaaagggcaggtgagtcaagaaccgcataggtctccagtccccacggggctcccaggccggggaaaggttcccctgaggtcactctgaggccagggacgtcacccaaggctggtggtcagtgtgaagggctccgtgccaactggtcagctgtccttcacgcacatatccgtggccacctgagacctgctccacgacccttccaggcagagccgagagttcgccccaacccttccccaggcccagtgtgaaaaacagactcacaaggggcttcttggcctgcagcttcatttgcgagagcgccgaggcaggacacagagcacagctgtgctggaagtgtggggagaacccggacagctcagtcctgccagcagccgcaaagagccgaggctgccaggcccatttatgtccctcatgtctctagattttctcgtcacccagcctcaaaaatatatgtgtctgcaaccctcagt

SEQ ID NO: 21 - DNA, 37476 bp, homo sapien
gatcaccatggcaaccggcctgtgtttgttccaacaggtgggcagaacctggtgcaagaccgcagaggcaggggcgtcactcccagacccggtctccagacccaccagcccctcaggagaacactgctacagagtggggctgagggcccaggccccctcccctgcttcccccaccgcgtccctgtcccagccagtccctgcatttcctgcaagctccctgccctcccccaccggcctggctgtgctgggtcaggatccggcagagcctgggccgagcgtcccgaaggagagcccacccaggggtcctgcccccgatcctgcacagacaggtgtggggcgggcatggatttgagtgagttgggatccagaagccaagacagttgttggcagacgggccccctccctttgaagagctgtgttctggaagcctgtctggccttgggctgcccaggtgcccttcgggtgaaaactccaaagtctgaccaccccccaccccttgtccccaaagggctgcgagtgtccagctgtattcgaccaagggcaggtgcgaccggggggccgctgcgccctcggcaagtctgagagcctcaggcccccgacaggaccatgcttagcacggacttctcaaagtgtggtccctggactggcggcagcagactggagctgggaagtgcaggcgctggctggcgtggggaccacacctgtgatctcagcgccttaggaggccggggaagggggatcccttgagcctgggagtttgagaccagcctgggcaacatagggagacccccatctccacaaaagaaaccaaaaaacattagccggcgggtggtcccagctactggggaggctgaagcgggaggaccacttgagccggagagttcgaggttgcagcgagtggagatggtgccactgcgctccaacctggttgagagctatttttgagagctttttcgagactctgtctgaaaaaaaaagggaaaaaacgcagatcgcgcccccacccagacttcgggaccagcgggttggggacaggacccatcaatgccttaacaaaccctgcaggagaccgcgggcccgctggggttccaggacagcgcagcggaggaagagcggggagccacccgggaggggctggcggggtccagtgcagaccccaggggctccgggggctctggccggctgtgaccccacaagcgccaactgggccctcaccagagccccagggacgatcgccccacagaccgtccgcgtgggcgtggggcgtcccgagtggatccctgcaggacgcatccccgccccgagaagagagcggcggggcccgcgaggtgtccctgagtcaggcccttccagaaaggtctgcaccgctgctggtcttcgtgaccgtggcttccctggggtccgcggaggagaccccgccgaccacccccttctagaccccacgcgccacggggagggcgcgcgcggccaggcggggtcccgaggcagccaagcccgctccccgtcccgcagccacctgtgggttgactcacagccccgcatcccgggggagggggctccggcccggctcaaggcacggagaccccggccgggtcccctaaggcgccgtggacgcggggggcggggcgagcgcggtcaggccccgccccggtcaggcccggccccgcccccagtcagaccccgcccccgcagcggcgtccgcccagcagttgctcagtcgtcggcgcgcgcggctgggagcggtagctgtgcctcggcgtccccgagctggtgccgagcgcagcgccccaggagcccccccatccccgcgccggcccacggtaagtgccgcgggctgcggccagtgctgttgggccgccgtctgggctcggccccgcgccccaacccggacggaccgacggccgccgcccccttggtccgggtcccccaggaggcacgggggtggcctccgaggcggggggcggtgggaaggtctcgacgtcccctcggccctggggaaactgaggccgcgcatgcttggaggggcggggtctcgggggcatttcccctccgaacgcgcaggagagggtgcggcggtggggtccgcactgcggagcggacggggagggtatccgggcgctggcgacggcctcccccgcacttgagccgccaagcgaggcttcgacccccgcgcctccctccccgggggagcagacgggcccggggcctcccagcacccctcccgggcgggctgcaccccccagcgtcctcgtcccttccctcctcccgcaggtcctcgtaaggccctttagtccccccgaaatccctgcgagtgcaaagcggcccctccttcagccccactcggcaaagggctgtgggctcttgcctgggccggggtctccgggggaggagtttaaagtgacacactagacccgcccccagactcaccccggaccgcccgccccctccgaggggagagacccccatagaactgggggtgtggctcctgcgggcgcccggggccccgggaaagggggtgccgcgaggcggggcagggagggggtcggtgagcagagggaggagggagcgctgcgcagacacgggcgaggggaggaagaaggcgcctcgggctccggtctcctgcgctcctgctgggcgccagcggctggaccttggcagccgtctgaggcttcggggagcccaaggccaccggcagcgcttgttagaatgcagattcccggggttcgactggaatgagaccccggggagcagcgtttgcagcgggcccgccaggtgacctgcacctgggcaccgccatcggcttcgcaggggccatctggaggagtcggtgagaccagggagagattcctgcgggaaacccccagggcctggtgaaggggagtcggggggctgagggaggaagagcagggaagctggagagaagaccaagagggcagcgtggagagccagcctgtggggcagatgtcctgccacctcccgccccaggcacacacccagggcaccatcagctaaccccctgccccaaatgtggtaagaagggcgcccccaacacgttgaaggcgtttgttcctagacagcctgcactggggaggaaggctgacccagcctctgctccgctgcccccagactcagctgcctcactgcccccaaccctgagcccccaaatggcctggcaggagacagcttggcttaagagtcccaggttcacatctgggctctgggcaagtcgcccccaccctgggctgtgaaatgagatgtgccatcctccttgcaaaatgtcattccccattcagcccaggcctgggggacagccagggagcaaggtgggatgggcaggtgtggctcagccccagtgccacaaggcaggagctccttggcggtcctccctctgctcactggacagatgggagtgtggttctggtcctggcatcaggcatgagcagagtatgggggggttcatcctgcctcatgctactgtcccagggtgagagactgggaaggagttacatcacgtctgggcccacgggaaagacggggggtcccctgcacctggctcactcctgccccgtaagtgctgagagccacccaggcagccagtgcttcctgtactggtcacagacagatgcatatgcccaccattcacagcagctccggcctctgtggcaggtggctcccagggcccacgcagttggctgcagccaggctatcagctgcccaggaagcctggggtttccaggggaaccaaaggggtttctgcgcacccaggatgagccaagtcttctgtacacctgtgccaagacgccattattgcacccatcctagcaacgggcagtgggaggggcaggagctgcagttggggtcaggggggctggcctagctggttgccccaggagcttagcactggggacaccaaagagaccttgactgccgtccccagcccacttgctggctctgggaccttgggcgggctcccagccctgcgcctccgtttgcccatctgagatgcagggagcaaagggcacccctctcgggccgctctggggatgaggaggtgaatgtggagaggaaaatgcagggagggtaccgagccccctttttctgcctggaacatcttgttatcacaaagacaccccctccccaaccccgcagttcaggccacttggctcctgcgtcacatttgtctccaggactgcgagcccccatcgcccctgtcacacgcacatgccgcggcggttgccctggcaacagctccagcagcggctgctccactggcttcgggggacagcagggggagcagcctcttccacccagcaagggaggggaagggggcttgtgactcccaggcccctgaggatttcacgactggctgtgggggtgacagcttccagaagcactgtacccagcctaccaagcccccccatcttttgggggggaggctcacaggggaaggcactgataggtttgaaggaggtgagtcccccccgcaagcattgcctctcacagggtgggagacgcaaaccctccttcctgtcctcagctctagggtctggtcccgtaagagcctgcacccagggctcgggggctggcagggaccctggaatcaagacgagatatccgggaatggtgtctgagctggtgtgggtatagcttggggctggtgaccctgaacccccacagacacagcaggggcccgggagctggctcgacaaagtccgtttggaacccaccactggcatggtgtgctcaggcccccacgctgcccactgagcttatgagtctagtgccactgtggggagctggcctggcatgcagggccaactgtccgtgagagcctgagtgggcggtagaacctgctggtcttcgtttcctctcctgtcccgtgagaatgactatgccctttgcgagggccagtgtgcccagcccggaggcaccctccgcaggtggatgagggagcactggcaagggaagggacccagacagcaaggccaggaccccggggggctgggggagcgcggtgtcctagaaatcagaggccggcaaggctgggacaggaacccaagagtgggtacctctcttgtggtggggcagaggtggcctggctctgggacagtttccatggagcggggaggagacctccctggggctgctggggggcagaggcagtgcagaggtggagggtctgcacctgcacccatgcagaggaagagggtctcaggaggctacggtgtcttagccatcatcctacccctgttgaagggggtgtgcagggcaggaccacccggccttcctccctgacacaggtgggctgggcggtgctggctcatgcctgtaatcccagcactttgggaggccgaggctggtggatcacctgaggtcaggagttcaagaccagcctggccaacatagcgaaaccccgtctccactgaaagtacaaaaaaatcagctgggcttggtggcgggcgcctgtaatcccagttacttgggaggctgaggcaggagaatcgcttgaacctggaaggcggaggttgcggtgagcggagactgcgccactgcaactcacttgaacctggaggtggaggctgcagtgagctgagatcatgccactgctctccagcctggactccatctcaacaaaacaaaacaaaaagtgggtggggccttccagggggcttccgggtctgcctgggcccaggctccgggccttggcagagggcagctctgtcccagcggtgacatctgggctgctgctgctgctgctgctccaagcaggaggctgacaggttggctcagttgtcatggcaacatgaggggaactgacgctggatggactgggagggaactgtagcccctacacccggcattttccagcggggcccggctcgcttcatgttctcgtttgtaccaactatggggagcaggccctgctttgtggggacactgccccccaccttctactgtccacctcaggtttgctgaccagctcctggggtgaggagggggcattgacccccgctgtgcttggtgagcgaggacccccaggcagtcccctccagggcctcctggccacatgggcatcctccacccaggatgtcagggttctggcgagtttttacctcctacataggagagctgggtacctggcatccgtcctggccccagagtcggcacgggggctgggggagctgagtgctgtggcccagatcttggtcctcttgatgcagccccaggaaacaggcgcctcctgctgtgctgtcgcggggaggggtgtggggggcgagtgtggcaaccgcctccctcgccagtgagaccccataagtccctgatggacccccagctctgggtgggcaccagccccgcctttgacagcatttgctacctcctccctgaagccgccctgcagggggcgcagggacttagccggtcacccagcaggtgtggggacaggagccctcaccgcctgaccaggtgcccagcgccatccaggctgtgggtgagctcccaggcctctgccccacctcttcccgccccacccccccacccccccgcctgctgtggtgcacggagggttgagtggacgacctgaggctgcgggctgtgctctctgctgtaggtcacccgccatgtcgaccttgctggacattaagagcagcgtgctcaggcaggtgcaggtgtgcccgtccttccgccgcaggactgagcaggacccagggagtgccagcgccgacccgcaggagcctgccacgggggcctggtgggtgccgaggggcccagccccacacgcccacagggccatttcccgccagacttcacacatggccgcccctgccccagcacccctgggcgggaaggagggtctgcagttagctgtgccacactgtggatgtcacatggcccttcctgcccctggagtcgagggtcccaggcaggggccagcgtgctgagagctgtgagctgacccggctctttctccaggaaacccggggatggcgtggagttctttgcccacatgcgcctcatgctgaagaagggggaaggcagacagggcttgccgtgcctcgaggtaagggtgccacccccagggcccgataccacagcccagcatggggctccccctttgctcctccccgctccctcctgccctcgctcccacctcctggggcaccacctgtcttccctgctgcaggcctggggctctccctgccgtcagagccctcaccctgggccccacacacaggtccccctgcgcagtggctcgccagcacccccggagcctgtggatcccagcctcggcctgagagccctggccccagaggaggtaaaggtgggggtcggaaccaggggcagtcgtctgcagcggctgctccctcagccgtttagaggcacctactgtgtgcacagggtctggtgatggcagagagccagggtgagtgggtgggtgagtgaggagcggaggggctcctggtgcaaagaggcagaggtggggcctgggctcaggcagacaggaggtgctgctgagggctgggggcctgggacgcggcactgtggccgcccttcccccacctgcaggtggagatgctctacgaggaggccctgtacacggtgctttaccgcgcgggtaccatgggccctgaccaggtggacgacgaggaggccctgctcagctatctccagcaggtcagcccaccctgaccccgacccagaccctgacagcttccccacctcaaccccttccccacccactgacaccatcatcacccaaacagtatgcagaatctccccgatccgtgcacagcacacagagacggctgcaggtgcacacacacacacgcacacaggctgcaggtgcacacagacacacgcacacaggctgcaggtgcacacagacacacacacaggctgcaggtgcacacagacacacgcacacaggctgcaggtgcacacagacacacgcacacaggctgcaggtgcacacagacacgcacacaggctgcaggtgcacacagacacgcacacaggctgcaggtgcacacagacgcacgcacacacacaggctgcaggtgcatacagatgcacacgcacacaggctgcaggtgcacacagacacacgcacacaggctgtaggtgcacacagacacgcacacacacaggctgcaggtgcacacagacacaggcacacaggctgcaggtgcacacagatgcacaggcacacaggctgcaggtgcacacagacacacgcacacaggctgcaggtgcacacagacacacgcacacaggctgcaggtgcacacagacacacacacaggttgcaggtgcacacagacgcatacgcacacaggctgcaggtgcacacagacacacacacaggctgcaggtgcgcacagatgcccaggcacacaggctgcaggtgcacacagacacacgcacacaggctgcaggtgcacacagacacgcacacaggttgcaggtgcacacagatgcacgcacataggctgcaggtgtacacagacatgcacacaggttgcaggtgcacacagatgcacacgcacacaggctgcaggtgtacacagacacacgcacacaggctgcaggtgcacacagacacgcacacacacacacaggctgcaggtgcacacagacacacacaggctgcatgtctacacagacacacacacatacatgcacataggctgacagacgcacctcgaaggacgctcccggcttccacctgcatgtgctctgaactcccctgtcctcccgtggcccccattcccacgcatgcacttgcgtggccctcatcacacccaccatctctgggcatgcccaggccccttggcacaaaccctctgccgctgcctcccaggcttcccccaaccctgcacccgtgaggactgaggttgggtgtctgtgacgggctgagcccgaggtcccagcacagtggccagcctcgcttcaggggttgcctaggccctgccaacccagccaccctccacaggtgtttggcaccagccttgaggagcacactgaggccatcgagcgagtgaggaaggccaaggtgaggccgccactgcctgggcaggcactgaccagcacgtgcctgcgtggcgggggcacggggcaaggccctgtcacctccatgctaagtagggcatctggggggcagctcagcctcaccaggccccccacgcccctctgtccacaggcccccacgtatgccctgaaagtctctgtcatgcgtgccaagaaccttctggccaaggaccccaacggtgagtggggacccagcagacctcggctgcgccgaggcctggcggccatggagggccagagggcgtggggccagggctgagacgcctgccgtgcccaggcttcagcgacccatactgcatgctgggcatcctgcctgcctcggacgccacgcgggagccccgtgcacagaaggagcagcgcttcggcttccgcaagggcagcaagcgcggtggacccctgcctgccaagtgcatccaggtcaccgaggtgaagagcagcaccctgaaccccgtctggaaggagcacttcctcttgtgaggccctcgcccgtctgggtgcgggaggggggctctgcctggggtccagagctgggctgtgcctggagggtggtggctcgcagcagctcccggtctctttggggccgtgtgcccactttccagaggagaaaactgaggcccagagatgggcgttgtgccaccggggccacacggctggcaacacctggcgggatcaggatttggacctgaacagcctgtctggagagcgggtgcttgtggcctggtccctgctgcttctggactccctgaccccggcctgggcagagcctcgccggggaccctcatgggcatctctgttctccttgtagcgagattgaggatgtgagcacggaccagctgcacctggacatctggtacaggcccctgcgccatgcagggcggcggggatgcacaccttttgcgggggagcaggacggactcagggcccggctgcgggctccagacaagccaggtcctcccctgtccccaccagggatcatgacgacgatgtatccctggtagaagcgtgcaggaagctgaatgaagtcatcggcctgaagggcatgggcaggtatgactgctgggacctttctacccatcacccgtgccctcagcttggtcatggggcccggcgggcagtggctccccaggagccatcagcgtgatgctcaccacctgtggtggccaggtacttcaaacagatcgtcaagtcagcccgcgcaaacgggacagcaggacccaccgaggaccacaccgatgacttcctggggtgcctcaacatacctgtccgggtgagtgggtgtggggtggggctggtgacacttagagaagggcctggggagtgtcccagccttcaaggggcagggcactgcctggagaagctcctgcttttgggcctccactgagtgcgcttgtcaccctcattccccggagaagggaagcccaggccatgtggtctctccagggtctcacagagtcagtgtggaaggggagggggaggagtctggtgggcctgacccccatgctacccccaggaggtgcctgtggctggcgtcgaccgctggttcaagctggagccacgctccagtgcctcgcgtgtgcagggacactgccacctggttctcaagctgatcactacgcaggtggggaaagtgggcgtccccgtcctccacccccgtccttggggcgggggcagagctggtgactgggtgggctctgcgttgcagagggatacggccatgagccagcgcgggcgatccggcttcctgtcccacctgctgctgctcagccatctgctgcggttggagcactcagcagaggaggtagtgggtgcgcctaggattggaacagcccggcagggggcctgaggaggggatgtggggctgtcccgcctccacccacgacagacctcctcccccagcccaactccagcagctggcgaggagagctcagcacaccagccgccaccatcctctgcctgcacggagcccagagcaacctgtcacccttgcagctggccgtgctgtgagtgggtggagctacgagtgggcggggaatgtgggcgggcgtgagcgagtggggcatcgggggccatgcggtgagtggatgtcgtggctgggagggtggggcagggaaaggggcggtgctgagtaggtggggctgcgctgattgggcgggaagggaagggggcggtgctacgggtaggtgaggcagcgaaaggggcggtgccatgagtaggtacggcagcgctaattggagggcagggaaaggggcagtgctatgagtaggcgcggcagtgctgattgggtggggcagagaaaggggtagtgctgtaggcggtgctgagtgggcatggcaggggcggggttcataccctttgaccatgggccgggccccacaggcactggcaggtcagcagccgccaccatcaaacctgcacgctggactacagctacctgctggggctgctggaggacatgcaggcacactgggaagaggctccttcactgccccaggagcaggtgggtgcagccgggaccttcttgccagccatggcgaagggagtgctggggactggggtcgctcagtgccggtcggcgaggggcagagtcctgcccgcgtgggggtcaaagacaaatggacaaactgtatgacgtgggcgagagccagcgctctgcagaaaggagacgggagactcgtgggagtcacctcggggggcggccaggacttaggacagggctggggaaagccgccaaggtggcgcccatctgagcgacaggagggagcggccctggcaggacggacgtgggaactgcaggggcacaggccctacgtgagctgcgtgggtggaaaccgaggctgggacaggccgtctgggacaggccgactgggcctgtggagggtgctgctcagagcagagctgggctgaccatgcccggggaagggtgttgcgggccaaggcagggaggatgtttctcctcatcagtggccggtcggggctgctggcactgaagggccctgtccccacaggaggagagcctggctgatagcctttccgccttctctgagttcgggctgcagctgctgcgccagctccgagactacttccctgccaccaacagcaccgctgtccaccgcctggagctgctgctgaagtgggtgcagcgccgcgtgtcagcgtgggtgggggcggctggcagggcaggccccacgtcagcgtgctgcccccacccaggtgtctgggcaagctgcagctcttccaaccctcctttgagatctgccccttcgagtcggagctgaacatggacattgctgcggccctgaaggtgtgttccaaagcccagtggaggccggctgctaagccctcccttccccttccctgccttcccgtcccctgcacctctgcaccacggtctcttgcccacctcttcctcttccctgcaatccaccatgctgtcttggtggtgtctgttgcagagaggcaaccgtgagtggtacgacaggatcctgaatgacaagagtccccgagagcaggtgcagttgtgggggaccctggccatgaggggtacgggcagccgagaggtgggtacgagctaggcttccttgcagccaggaccacagcgcctgcctgggctggttgtgctggctgacgccgtctatgatgaccttcagttctgctacagtgtgtacgccagcctcttccacaggtgggcctggcccctcagtgctgtcctggggctggggtcggagccaacagggcctgcaggtggggcgcaggtggatgaggtgtgtcccttgctctgcagcatcctcaatgtggacgtcttcaccctgaccttccggcagctggagcgtctggtgaggagggtccctgaccccgggtgcctgccaggcatggggaagtgggcagatgcccttggctaggacggtcctgggattccttgctgctggaggcctgatcctgctgtcccggacaggtggctgaggaggcgtgggtgctgacggaggagctgagccccaagatgaccctggaggtggcctcggggctctttgagctctacctgaccctggctgacctccagcgcttctgggatagcatccctggccggtgggtgccccgtccctatctcttgcagacagactttgggaccagggccccaggacctgtgagggggacggtcctggagctgtgagcctggaacgtgctggttaaggtgtctgagtcagggccgagccctcacaaccctcccaccacagggacagccgctctctggccctggctggcatccacgcccccttcctgcctgctgtgaagctctggttccaagtgctgagggaccaggccaagtggaggcttcagggagccgtggacatggacacggtgacagctgccctggcctgaggacactggggctggtccaggcccccagcctcccccgcctccccagcaaccccagcctccccagcaacccccagcctcctccgcctccccagcctccccctcaaccccagcctccccggcctcctccgcaaccccagcctccccagcaaccccagcctccccagcaaccccagcctcctcagcaaccccagcctcccccgcaaccccagcctcctcagcaaccccagcctcccccacaaccccagcctccccggcctcctccgcaaccccagcctcccccacaacccccgcctcccccacctccccagcctcccctgcctccccagcaaacccagcctcccctgcctccctagctggagcccgtggacgcctcctccaggcacagcagctccgcagccactgctggtctctgcctcagccacatccaggagttgtgggtgcgcctggcgtggcctgaccctgcccaggctcaggggctgggcacccagcttggccaggtgtgtgggtgggccctgggggtgaggggaacgggtgggagaggagatggggcaggggagggctccatggctccccaccgccatcccctcctcaggacgtgtgtgaggccaccctcttctatacggagctgcttcggaagaaggtggacactcagccaggggcggccggtgaagcagtgagcgaggcggtgagtgaccagctggggaggggagccggcaggaggtggggggccatcaccaggccccggacccatcgttgcctggccacacctcctccagctctgcgtggtcctcaacaatgtggagctcgtgcgcaaggctgctgggcaggccttgaagggcctggcatggccagagggggccacggggcccgagggggtgctcccccgccctctgctcagctgcacacaggccctggacgatgatctgcaacgggaggcccacacggtgacagcgcacctgacctctaaggtgggtggggcctggagaccaaggcgtggaggcagtccctggtgccccctgcccgtgctgagcactgctcctgccctcagatggtgggcgacatccgcaagtatgtacagcacatcagtctctcgcctgactccatccagaacgatgaggtgagtgccggggcgaggggccgtggaggactgtgtgtactgggggtagggcagaggtgcggggtaagcctggcctgaccacccctgcccgcaggccgtggccccgctcatgaagtacctggatgagaagctggccctgctgaacgcctcgctggtgaaggggaacctgagcaggtgcgggcgggtggggtgggatgggctgggctggcccgtggtcactgaggccgccctgcagggtgccggaggccctgtgggagctactcctccaggccattctgcaggtggggccagcggggcaggtggggctggcccgtggtcactgatgctgccctgcagggtgctggaggccctgtgggagctactcctccaggccattctgcaggcgctgggtgcaaaccgtgacgtctctgctgatttctacagccgcttccatttcacgctggaggtagagctctgtgaaggagtcctccccgccggcccccgcctcagggctgctctgatccctccctttgtccccactggcctgcctggtctcctgtggctggagagcagccactccagggctgtccacagcgcctcctcccgttaatgccgaggtgtggcctctggtgatggcctttccccacgcttcctgggagcttccgatgcccgccagggtgtgagaaagggctctgcccttggctgctgagcccccagtgctgcctgggcccctttgtgctgggggtctctacctgtccccagcacaagccaggctccctgacacctctgccttctttccctgccccaggccctggtcagttttttccacgcagagggtcagggtttgcccctggagagcctgagggatggaagctacaaggtgaggtgggaccctctgtggggcgggggtgtggatgaggggactgagttcaaactgcagccccacacgggctgtgtccttgagcatgaggtggccccacgggcagtcaggtctccaagtgccagcgctgaccaccagcacccaggggcccctcctgatgcgcttccccctgcagaggctgaaggaggagctgcggctgcacaaatgttccacccgcgagtgcatcgagcagttctacctggacaagctcaaacaggtagggaggcgccagggacagggtgctgcctccgaggctcccagagcccagctgcgctcacccgcctttccgcagaggaccctggagcagaaccggtttggacgcctgagcgtccgttgccattacgaggcggctgagcagcggctggccgtggaggtgctgcacgccgcggacctgctccccctggacgccaacggtgagttgcagcggggacgggtcgggtggtggtgggatgggggcaggggggctcacgactgtgctcctgcaggcttaagtgacccctttgtgatcgtggagctgggcccaccgcatctctttccactggtccgcagccagaggacccaggtgaagacccggacgctgcaccctgtatacgacgaactcttctacttgtgagtgtcctaagccccagccccagccccaggctccaggctgccggagcgagactcccgactggcctctgtccgcagttccgtgcctgccgaggcgtgccgccgccgcgcggcctgtgtgttgttcaccgtcatggaccacgactggctgtccaccaacgacttcgctggggaggcggccctcggcctaggtggcgtcactggtgtcgcccggccccaggtgggcgggggtgcaagggctgggcagcctgtcaccctgcacctgtgccggcccagagcccagggtgagtgagcatctgggtggaggcaggggcagcgggcctgaccccggcccccacacacctgcccgcgctgcttgcagtgagatctgcgctgaggaggctggaaggccgcaccagcaaggaggcgcaggagttcgtgaagaaactcaaggagctggagaagtgcatggaggcggacccctgagtccatcagctgccagccccggccctggcccccaccccaagttccctgaagcatcctccagctcactgtggccagctttgtgcaaccagggcccacggcgcccctcctgtgctgtgacgtgtgtgtcgtggctggccccgcggcgcctaccgccctggccgtgtctgtctggtgtgtgctgtgaacccctgcacccaaccccacatctgggtggccaacttggcaggacttggccagcagctgcccaggacacagtgcaggccagagcgggcttgaccacctggtgggcctccctgcccgcttccttgggctccccggccctgggtgggcggtgggcagctggtctccagggactcagtgagtggctgtgctctctgcacaacgggcaatgtgcagacgcatttttggtaatcacagctggggagtgaaaagggtgccactggcaccactgggtggatggtccagagcctccacccacagaggggatgcaaagggcaggtgagtcaagaaccgcataggtctccagtccccacggggctcccaggccggggaaaggttcccctgaggtcactctgaggccagggacgtcacccaaggctggtggtcagtgtgaagggctccgtgccaactggtcagctgtccttcacgcacatatccgtggccacctgagacctgctccacgacccttccaggcagagccgagagttcgccccaacccttccccaggcccagtgtgaaaaacagactcacaaggggcttcttggcctgcagcttcatttgcgagagcgccgaggcaggacacagagcacagctgtgctggaagtgtggggagaacccggacagctcagtcctgccagcagccgcaaagagccgaggctgccaggcccatttatgtccctcatgtctctagattttctcgtcacccagcctcaaaaatatatgtgtctgcaaccctcagtctctctgccgtttcttgattcctttccaaacctcagccggggccctggcctcagccccccgtccctgcgtctgctcctcttcacagcagctgctgctggctcctccgcgctcggcgccaggccctgggtcctcagacgcatcactgtcatcagtgtccgagggcagcctgggagaggagggggagcacgttcccaaatgacgtcctccctggctagctggagtcaacgtcatccacaaaaagcccccagccgaggacagattcctcttcctccctgtgctctccacacccaaacctctccagtgggacatgcactgcaggttttctagtcagaagaccatcggggtgttgtttacaacaccacccccaggcagcaggaagggctcaggccagaggtagaagagagccctgggtctgagtgatcatgaaattaagcccaaggacctaccgggtgctggccacaggcctgttggggtttccaaactctctccctgaatccacatcgaagggatctgagccgagagaggaaagtggcctctaagtgagctcagagcaggaccaggcctcccaccccccaggctttggagggccttggttcccaccccgccaaggctcaccgatctcctcctcctgggggctctccttggcattggccaagaactcctgctccgcctgcagcacctcctccgggctgccgcaggccgcgtacttgtccaggagctggcggttcaggtccaagaagcccttgccccatttaaacttccgcagcaaaatgacagcaaggtctggaaagcctgacggtgtgagaaacaggaaacccaaagaagtcgacggtcccctcaagtgcctcctgatcaccctgctgccggatggcggcgctctcccaagtaaccgcagggtccccagcaaacatcagctcacagtcctgagaacccgtgctgcccccagcctgcacctcccttgctacagtccacacctctgcaaccgaccaagtccccctcctttgctgcgaaacaaacattcccaccaagactgccccacgcctcatcagggcctctttagatcagcaattcagtaaggaggacgtggaggataaggaggattctctgggcagtggtgccctgataatgaatggcaccccacacaccggccctgatagaacagcgatcccattctgcctctactgcaactccacaggccgaaaacctgaagtgacagttggggctggaaccgtggtctgtctgaactgttcccctgtccgtcccttatgctcctcctggggtctgtcggcaggaaacatgatgctgggagcatagcaggaacagcaggccgccgggtcacactgctgtggggcccctggactcacctacgatgcagaaggtggcagcaaacgcttccacgcaggaaagtctgtagggccggccatagttcacggggttggcggccaccaggtagggcaacaggcgcaagtggctccctcgcatcttcccaaacggtgtctcgtccagcctggcccaggagcagtcgatgacggcgaccccagactgcgccaccagctgtctgccagggacagcatgggataagttcaggagccagcactacccaaggtggagcatgccccggagaatggcctagctaagggattcagggacatcattccgccatccccaaacaccctcaaacggacttcacgagcaagcttttgaggcagctgcttggggcacctggagcatgtgtttattcactcaacaaacgtttattaccccaaaacctcctttatcccaggctctgcgctacgcaacggaggcaaactagacagacgttccctgcccacgtgggtgtggatgtgggtgcgacatacaagtgccactaaaccatccctgaagggaaccacgcgctggaaatgaagacgacctcgggcaggcctcccgcgcctacctgtctgcgggggacgcgtactgcttgcccacggggctcagcaccagaccgccgaatctgtggcccaggcgcaggcagcgcaccagccccaggcgggccagcttgcggcccgtgcagcgccgggggtcgcagtggcccaactcccacatggccagcgtgcagggcagcgccgccgggcccgggccgccctcgccgtcagccgcccctggctccacggaagctgcacgagagagagaagggcactcggcctcagcgtgggacccccgggcaggccctcaaaccctgacccgctctccccatcacgcctcgctcaccctgcagcgcggcgccgacctcctcggcgaaggcctccagggagcgcgtcgggaggtgccgagggcggccgccttccgcccccggcccgcgcgctgccctcctgcggcccatggcgcggacctggggtgccggggactccccaccccacggccgcgcccctcggcctcccaatgggctgtgcggctgccagcgcttgcgccggacgccacttccggtccccgtggtcacgtgaccgtcacttcacgtgaccgcgcggcggccgctgcggcgcgatggcggcggggctggcgcggctcctgttgctcctcgggctctcggccggcggtgagtggcccggccgtccgcgtccccaggccccgcgcgcgctctgcaccccggcctccccgctcacggtctcgctccccgtagggcccgcgccggcaggtgcagcgaagatgaaggtggtggaggagcccaacgcgtttgggtgagcagcctcgcgggctggcggctcgagcgggggacggcccgggcccgttccccgctgaccttgccgcttcccgtagggtgaacaacccgttcttgcctcaggccagtcgcctccaggccaagagggatccttcacccgtgtctggtgagtgaggagcgctgttggccggcgcgggggtggccgcggggagcagcaacagtggaggatggatgagtgaccctgagagttacggcccggagtctaaagcattggtttgtcagccttctaaaattaatgtggaagtacgagagaatataccagaacgttcttgtagcgaattaaattatctccagacttagtccttcctttcctttccgagaggtaactgctgttaatagtctggtgactttgcagacgcgtttctgtgcttttacgtgcgtgtctatgcaactggaaaacgtatagtttttgtaatctaatcgcttttttaaaaaatcatgctgcgcgagtatttggctgatttgtcgttgtcactcgctgtatctctcgggacgcttcatggtgatgatataggtcttcgttctttctcttggtgctcagcacgcgataggatggcactgcactccccgattgtatttaggttcttgccatttttttggccattagaaatagttctgtggagaacatgctgtgtaggtgctttggtttgccctcaggtgagcggtttcccagtgcaggattccagaagtggaattggtgggtcatgagtatatatatcatttaaacgctgaatgagtattaaatataatagacaaaaatccaagaatttttttttttttttttttgagacaagagtctcgctctgtcgcccaggctggagtgcagtggcacgatctcggctcactgcaacctccgcctcccaggttcaagcgatcctcatgcctcagcctcccgagtagctgggatcacaggcatgcatcaccatcacgcccagcaaatttttgtatttttagtagagatagggtttatttcaccgtattgaccaggcgggtctcgaactcctgacctcaagtgatccgcccatctcggcctccaaaagtgctgggattataggcgtgagccaccgcgcccagctttagtaattttattatcgaatacctttatgtgttagggtctgtgctggggttgcagaaacgaacacagatataccaatgcttgtcctcatggagctgacagtctaatggggagggatggaggaacaggcactgagcctgtagaattagataaaatacatagaatggccaatgatgaaaaatgccatgtagatgtgtgaagcagaggagggagtgtgtgtatgtgtgttagagtattgtttgggggatcgctttttttattttttagagacggggtcttgctctctcactcgggctggagtgcagtagtgcaatcatagctcactgcatccttgaactcctgggctgaagcaatccaccaacctcagcttcctgagtagctgggactacaggtgcacgccaccatgcccggcaaatgttaagtgttcttgtagagatggaagtctcactatgttgcccaggctggccccaaactcccagcgtcaagcaatcctcctgtcttggtggggattgctttaaatagggtgctgaggaaaagtctaagaagtgacatttcagccaaaagctaaaggagaaaagggagtaaagctgtggctatttggggaaagggatccaggaaagggagtggccaaaggccttgagcaggacagccagggccagaggggattcagctggggtagccacagatcagagataaaggggatcagatggtgccgcaccgtgttggtaggtttggtggactttgactccaaacacatctttttaagttttttgttgtgtggctgggcgtgatggcgcacctggggttaggctcacttccctgcggctcagaagccatgggatggtggcttcccagggcctgaagtgctggagtcgggccaccacctatcccaagaagctggggaggaggcaggccactgtgtaacagcgcagttcccgaccgaaccccttccagtaggagagaggcagccttggctaatgggaccacgtctttttggaggtgagagtcctggaaagaaaacagaatatgctggtcgtggtggtgcgtgcatgttgctcgggagcctgaggtgtgacgatcgcttgaggtcaggagttcgagaccagcctggccaacatggtgaaaccccgtctctactaaaaaaaaccacaaaaacaaaagttagccgggcatagtggtatcctcctgtaatcccagctgcttgggaggccgaggctggagaattgcttgaatccaggaggcggaggctgcggtgagctgagatcatgcccctgcactccagcctgggtgacagagcaagacttcgtctcaaaaaaaaaaaaaaaaaaaaaaaacccataaaaatttagaaaagaatacctcttctagttttcccacccccatccccacatcagggccagtcaggttcacatgtgcatttggttcattatgtgtctttagtgttttaatttggaacagttctcttcccacctttggatgtaagtggcacatttgtttcccagtttcctgatctttttgttttgttgatggtgtttttctccagaccattttttcctgcgcctgtggggtcaggcgtggatagtcccccgcgtctgtagggctgggcgtggatactcccccgcgtctgtagggccgggcgtggattgtctcccacgtctgtggggtggggccgggcgtggaaagtcccccgcgtctgtggggtggggcctggatactcccccgcatctgcggggtggggcgtggatcgtctcccgcatgtgcggggtcgggtgtggatggtctgccgcgtctgcggggtcgggtgtggatggtctcccgcgtctgcggggtcgggtgtggatggtctcccgcctctgcggggtcgggtgtggatggtctcccgcgtctgtggggtcgggtgtggatcgtctcccgcgtctgtggggtcgggtgtggatcctctcctgcgtctgtggggtcgggtgtggatattctacttgttttttctgtctttgatgtagcgctccttcaacatcaacgtgtgaggcggattgtgtgcagtgggtaggagagtgtggtctgtggaatgagctgagcagaaagataatcaggctgagaaactcaggggcgtggtgattgtggcctagggctcagaaggtccccgcagaagagtgtctgccaaggagaaggaaggggtgggcttgccagggccgaggctggtggggctgggctgggcagtgggcagctccatggcctccaccagatgagtcgggagcctcgtcccttgacagcaggaggagcagaggttggtaggtctgtgatttggagacagtgtcccgctgtggcatggagagggaatggggcacggtcagtgtggtggtcctgccagcgcccagcagagtccagcatagcccagcacactgtccaggagggagctctgcctcggtggcggtgggagggagcggccagctgggcaggactctggggccttggcagggtcctggatctggggagggggcgggggaggagtagagtggccccgggatcctggctagagaagccatggcaagtgcggctcccagcatgtgagttgcaggggtcaggctgggagcttgctttcggctggggccgggctgggtctgccaggcagtccctggtgcttggagagggtcacggtgggcacaggactcaccagggggtgcgtgaggccggagggtgagggtgaggtccccggtgaagttcttggtggcgtgtgggggttgtggaggttgggagggtactgggaccaggtgtggggccgggccagggagcagcgtgggagggaggaccacccttgagaagggattgtcaccaagagacgcagccctagggggagtgctgcccaccgaagcctgaccggggcagaggggaaacggagtccaggctcagccaagctgatgggccttgagctgtggcctcgggtgcagggacagctggcagtaaggccacctgggcccgcgggagccaagggcaccggcgagtgtcctggccatgcaggccgtgaacacggagcctgcaggggacgtgcgggtgaagcaggagcagaggagaagcctcccggcaggggtggtggcatttgggggtggtggtatttgggggtagagactcccgctcaggtatggctgtgtctggcccaagaggcgtggaggggccagcccccacctgtctcaggaggacaggctgctgaaacctgagggccaggcggaggggaggggccgtggccggggttctggtgtgggccagcagcagaggacctggggtactgggcactgccagttgggggcttgtggtaccatcccctgcgggaggctgcacctcagccagtaggagtccactgaagctgtggacagcacccaggcagaggcctcctcccagctggggagccaggccaggccccgctgccctcacacagtcctgtttagacggatggccctgcaggtgcagagctaagcccggcgcccacgcccctcctggggtgtctccaagcagtgtctgcctggggcaagcctgggaacgtgagttcccaggacacaggagcttgaccagccaccctcccagcgggagtgtgagagcgggaatctgcgggcgggggtctgcgggcgggagtgtgcgggcgagagtgtgcgggcgggggtctgcgggcgggagtgtgcgggtggcggtctgcgggcaggagtctgagtggcagatgggtgagggacacatcagggtctctgggatggctccaaaggcttccctatgtgcctgttgggcagggccctagggccagactggagggaccaagcccaagcaccccaggctgtgggacagcaggtgtgacagggctgaggtagagcccccagcggtcaggctgggaggacagtgggtgagcctgggagtaggggccacccagatggtatttgacaaggaaggaccaggacctttctatatccacagcccctgtcccctgagcagggcagcctggccatcttggtctccatctgtcttgggaggggacagccccaggggtgagtggaatgtcagggaacagaaggccaggccgggccagcaccccagaggtctcagtggcattagcctctgccctccgggggcgggggccaggctgagggtggccccagtgtggcatctggctcctgggctggccagattcccagggaacagtcacccagcacctcgtgtgtatttcgactttattattattattattattattattagagccgagtgtcgctgtgtcgcccaggctggagtgctgtgtcgcccaggctggagtgcagtggcgcgatctcggctcagtgccagctccgcctcccgggttcacgccattctcctgcctcagcctcctgagtagctgggactacaggcgcccgccaccatgcccggctaattttttgtgtttttaacagagacggggtttcaccgtgttagccaggacggtctcgatctcctgacctcgtgatctgcccgcctcggcctcccacagtgctgggatgacagtcatgagccaccgcgcctggcctcgactttattattaatacggtaaaactacagagagtttgaaacatcagtctggggcgtcctcctctaaccagtgcacttgctgctgcagcgcaggcccttcaggggacggggatgggggccagtcccctccctgcctccacggcccaagccccagccttccccacagtcctggaggatggcccgtggctgacagtctcggtgggcgctgtgttaaggtggcgtccccagccaggtcccgactccccagcttaaagaacagggtggctgctgtggcttgactcacgagttgccactggccttgatgtgtacacgcccttgctctagcactgcctggggctggcctggctggagggtagggacgctgcacgccttccctcttcccccaggcgctggtgacactgccctgcaaccgtcagcaccatcatctccacaacttgctctgtccccttcaaaccctgactcccagctgccccgctcccccagccccggcacccaccattctgctgtctctgaacttggctattcatagacgtcacataggtgactcataactgtgtgcgaccttttgtgtctgaccaactcctcttggcacagtgtccccaaggtcccccaggctggaggctctcagtgcttcctttttatatggctgaggactgttccactgcaaggacagaccacgttgttgtttacccgtcatctgtccatggacactggagtggcttccaccctctgcctgggaataggctgctgtgaacttgggtgtaaatatttgagtctctgcttccaatttctgagagtagctttgctggatcttattagaattccatgtttagctttttgaggaaccaccaaactgtttgcatagtggctgcaccgtttcccattccagccagcattgcacgaggggtccagtttctccacattttcaccaacactgttttttgctaacagccatcctagtgggtgtgaagcggtaccttagggttgttttaatttgcatttccctaatgatcagtcatgtgggatcttttcagttgcttatggtgtttgtccttttttttttttgagatggagtctcactctgtggcccagactggagtacagtggcgccatcttggctcactgcaagctctgcctcccaggctcaggcgattctcctgcctcagcctctcaagtagctgggattacaggcgtgagccaccacacctggctcatttttatttagtagagacggggtttcaccatgttggccaggctggtctcaaactcctgacctcatgatccgcctgcctcggcctcccgaagtgctgggattcccggcttctctgcccatttttaacttgagtttattgttgggctgtagttctgtgttctggatgtgagtctcttacatacgtggtttgccagtgtttattttctcccattctgtgggttgtcttttcactcccttgatgggtttgtttttttttccatatagagtctaactctgtagcccaggctggagtgcagtagcacgatcttggctcacggcaacctctccacctcccaggctcaaggaattctcctgcctcagcctcccgagtagctgggactgcaggcatccgccatcacgcctggctaatttttttgtactttattagagatcaggtttcaccatgttggccaggatggtctcgatctcctgacttcgtgatccgtctgcctcggcctcccaaagcactgggattacaggcgtgagaccctgcgcccggcctctatgccagtctttatgccagtatcacactgttttgatcataacagctttgaagtaatttttggaatcagtatgtacgagtctctcaactctgtctttaagatttgttcgatgatttggggtcctctgagactccctatgaactttaggatgtgtttttctatttctgcaaaaactgtcattggggttttgatggggttgcattgaatctgcagatcactctgggtggtattgtcatcttaaaaatattgaatccatcaggctgggcgctggggctcacgcctgtaatcccagtactttaggaggctgaggcaggtggatcacctgaggtcaggagtttgagaccatcctggccaacatggagaaaccccgtctctacaaaaatacaaaaattagccagccgtgatggcaggcaccggtaatcctagctactggggagactgaggcgggaaaatcggttgaacccagtggtggagattgtagtgagccaagatcgtgccactgcaatccagcctggcgacaatgctagactccgtctcaaaaaaaaaaaagtggcgtatggatgtctcatgtcagctttatgtagtgggtggcactgtttgtgcgtggataattgtggtgtcttggcacattgacccttttatcaatgtataacatctttgtctcttaaaatagtttcagccacttcagctctcttttgcctgtttatatgaatacttttccataccttcactttcaacctgtttatgtctttaaatctgaagttagtctttcaggccgggcatagtggctcacacctgtaatcccagcacttgggaggccaaggtggacggatcacttcaggtccacagttgcagaccagcctggccaacacagtgaaaccccgcctctgctgaagatacaaaaattagctgggcgtggtggcgggcacgtgggatcccagctactcgggaggctgaggcaggggaatcacttgaacccaggaggcggaggttgcagtgagccgagatcgcgccactgcatttcaccttgggtgacagagtgagactgtctccaaaagaaaaaaaagaatctaatgcctgatgagctgaggtggaacagtttcatccccaaaccacccatccccacccccggctggtagaaaaactgccttccatgaaaccagtccctggtgccaaaaagattggggaccactggtttaagtcctgtagctttacagaccatagctagaaaggcaactggtattaattcaccctgcacgaggacctccgtctgcctccgctgagctgctgtctgctcacttccccgggtggcacaccggcctgcatgtaaccaactcctgaagcttttatctgggaatgtcctcttttttggggggtggggaagacagggtcttgctctgtcacgcaggctggagtgcagtggtacgatctcagctcactgcactctccacctcctgggttcaagagattctcctgcctcagcctcctgagtagctgggattacaggtgcgcgccactacactcagctcattttttctgtgtgctttttgtgtagacacggggttctcacagtgttgcccaggctggtgtcatactcctggcctcaagcaatcttcccgccttggcctcccaaagtgctgggattacaggcatgagccacgatagcaagccttaactctaatttttgaagggctatttttagaattctcggttttgtcagtttcttccattgaatggtacctgttttcctgtttctttgaacgtcttgtgctttttgttgaaaactggtccttggccgggcgcggtggctcaaacctgtaatcccagcactttgggaggccgaggtgggtggatcacgaggtcaggagatcgagaccatcctggctaacgcggtgaaaccccgtctctactaaaaatacaaaaaattagccgggcatggtggcgggcgcctgtagtcccagctacttgggaggctgaggcaggagaatggcgtgaacatgggaggcggagcttgaagtgagccaagatcatgccactgcactccagcctgggtgacagagtgagactccatctcaaaaaaaaagaaaactggtcctttgaaaacagactctgccagtctttgcagacaggttctgtgcttggaccctggggatcagtgtgaggtctcttccaggacccgtgcatctcttccgactctcgggcaagtgcttcagcctggtggagtccacgtgagtgcagggtgggtgcgagggtgggctggggcgcagcctgcggacccccctcatgccatctgtgtccccaggtacaagtatgagttctgcccgttccacaacgtgacccagcacgagcagaccttccgctggaacgcctacagtgggatcctcgggtgagtggggccggggcagggatcccaaagcagcagcgcagctccccacccggcctcacgtgccgtgcccgtgtctccccagcatctggcacgagtgggagatcgccaacaacaccttcacgggcatgtggatgagggacggtgacgcctgccgttcccggagccggcagagcaaggtggggcctcagacgggagcccgggaagaggggccccagtctccccaacccacctacccacgttccctccccaggtggagctggcgtgtggaaaaagcaaccggctggcccatgtgtccgagccgagcacctgcgtctacgcgctgacgttcgagacccccctcgtctgccacccccacgccttgctaggtaggggtgcgggacgcagttgagcccagtggggtcagccgcgcacgcagccctgctggaggccctgtagtgctgggggccagggttgggacatggggtgcagctgagcctggcttctcttgggtcctcagtgtacccaaccctgccagaggccctgcagcggcagtgggaccaggtagagcaggacctggccgatgagctgatcaccccccaggtaagcgtgcgctcggggtggcccctggtgggcctggctgggagctgggtgctgcccctgcatcctccaccttcagggccatgagaagttgctgaggacactttttgaggatgctggctacttaaagaccccagaagaaaatgaacccacccagctggagggaggtcctgacagcttggggtttgagaccctggaaaactgcaggaaggtaccgtattggggggaggtggtggcacgcagtagccctccagcacctgggctttcccttgaactctttttgtggttggtaggctcataaagaactctcaaaggagatcaaaaggctgaaaggtttgctcacccagcacggcatcccctacacgaggcccacaggtgagtcacctgtggggagagggccaggctcaccatcacactcgccacctgtgggtccaggtgaggactggccacctggtgttttggcagaaacttccaacttggagcacttgggccacgagacgcccagagccaagtctccagagcagctgcggggtgacccaggactgcgtgggagtttgtgaccttgtggtgggagagcagaggtggacgcggccgagagccctacagagaagctggctggtaggacccgcagggaccagctgaccaggcttgtgctcagagaagcagacaaaacaaagattcaaggttttaattaattcccatactgataaaaataactccatgaattctgtaaaccattgcataaatgctatagtgtaaaaaaatttaaacaagtgttaactttaaacagttcgctacaagtaaatgattataaatactaccttctgggttaagaaaattccattcaaataacattctcatgtaaatactcaaacatacagattgaggcttccagaaattaatccacttgaggcgtccacgcggaacaaggtctgctgaccacagttacacacgtcgtgacaccactgtatcacggcgaatgtcgaacactagagttacagacgacaggcaacaagaacatgcagagccggccgccagccagctcctacgccccgtgcccgccatggccacaggggggagctgctgggcgcgcctccacctcagcctccacggggcaccttccagccactgctgtgcctcagccacctaggagccatccctgaggccatggccaccaagacaggtgagggaggccccagggcacacagccccaggatcttgcccccatttccaaccctggcagcgctgccagccattctttggtcttcccactgctcacctgtcctcagagccagtactgatctaggggagcaggtgccacctccatctcccagctgtccccccacccctggggctccccagctctaccaccccggaagctgagccctggagacaccctgaggggcgggcgccacctccttcccagaaagagcagagcagctggcagactagagctcagctgctcctgaccactgacaaccgggagatgtctcggcagacaccacttatcccagaaaagaccagaggctccaaatgggaaccaagtgcataaatacaaataaaaacagagtttacacatcgatgacagtagcacaaaatatacgtaatttctagatactgagctaataaatcactgtagttaaaaacaaaatagattcactgaaaccaagtcgatagttaccttggagtagtggactagctgcagaatgtcacggacccacttcctttaaaacaacagaatgttgctatcagtttgtcttacgttaaaacagttcttaaaccacctactatattaaatacattctaatttggtcactgatgataaagatttttacctagacgttttgcacttaaaaaatgctattaaaagtctttggcaaagccacggtcggggagaaacacgtcggtgccgcttcccactcgtgtgccctcaccacccacgtggcccgcggagagccaggtcgccgtaaaccacagatgcctgttcctgctcaactcctagggacagtcccagccctgagcagaagggtcaggtcatcgcggggatgcgttctcagtcacgtttctgctgcggccgaaaccacactgtcgctccaggggcagacgggacaggggaccacagcagagccgggacctggggggggtcgcttcccccgtgtgctccaggccactgagaggctgtggccgggtcctctcctgtgacctcactggccacatggatgagctccgatgataactggcagcgcgggtcaggtgactgccacatacacccggcaccccggaccctggcgcacacacggcccgagcatctcccacacgagcaggaccagggtggtcacgggtgctggggaggcaaccactctcccagttcactgcctgacccctgccaggacgcccagcgacatctccaaggagctacaaagcaccattgcctaggacagctctgagtaatcagaaaacagctttttttttttttttttgagccagagtctcgctctgtcacccgggctggagtgcggtggcgcgatctcggctcactgcaacctctgcctcccaggttcaagcgattctcctgcctcagcctcccgagtagctgggactacaggtgcccgctctcacgccaggccaatttttgtatttttactaagacggggttgcaccatgttggccaggctggtcttgaactcctgaccttaggtgatccacccgcctcccaaagtgctgggatcacaggcatgagccaccgcacccagccagaagacagctgcttaaaaaagtaattctaaaagctctgacgtcggatcccctctgctgcgttttttgttagtatcaaactgtctttcagagggttaagggagaaaacaaaacccatgatgctccttcacttgctctccgaggcgcaggcgcacagaaacagcggccacggaccacagaaatgcaggacggagctctcctgctcccacgccacgaggctggaacatcagccccagtgcctggtgcacacacaggctcaggaaaactagctccttccatcaagttaaaaacatctcaatccataatcactctgcttataaatactatttgcacttaattggaaaatgtaaaaatcctaggtcttactactagataaacactcatttcataagtactagtttcagaatatgaaatctaatatatttagcatactatgaattgacaataaactgatatgaaatatttaagttcacagtacacatataaagcttcatattatcgcatattaaaaaaaaacagaaagcagcttagagcaatttataacctctaactaaattcctcggtttacaaagtgctttgaaagaccccagctcccagtggcctagtcacagtagtgtcaggaccacaaactgctgtgatcacagcgccgcgtggatcccggaggcaccaggcccctcagggacaggcaggcgggttctgtgggtttgcatttaaggtttttgaggaaaataccttgaaaccgtcggtaggactagataggtgacaacgtgtgacaggaaaggctgtcaggccaagcgcaggcggggctcccagcctcatgataacgtgtaacaggaagggctcccagcctcggtcctcacgtcggtggcaccagaagcgagtgacgacatgtccgtggtcaggaggagcgctggagccagggtgcccagcaggaggtggctgtccccgctgaggtcaccactgcaggggctggcccttgcagtaggggcactcaggtgcggtggccgcacacggctcacagaggatgtggtgctgacagggccgcaggacagcaccgtgggcccgctcccggcaggccacacactgcttggcgcggagctggaagatcacctgcagggccagaacaatgacgggctcaggaggcccctgcccaggctgggccagctggggagccggagggccttccgggcaggactcagcatctcaggccgcccggccaccagctacagagacagggtcagggagacgccccagccagggccacctcagggagaaggcagctgcggggtcagggggtatgctctgtcttaagagccctgggcagaggacagcctcctggggccaccacagacacggcagtggccagacaggccaggcccctgagggcagctgggtgcccaggatgtgggctacgcaggaccctctgtcctatagcagcgagtccaagagcccacccttagcaggcgaggtgaggaggggcacgccgaagtggaggggtcatgtgtgagggtcacagctgtgaacagggagggatggggccacggggagcagtgtggcattcgctgacaagagggaggggtgaaagggcaagggccagcctgacaggaaaggcggctcccagggagacaggcaaggaggccacagggggctgtgctggggtggggcaccgtctcctcctccctaggcccggagcagaccctggggcaggggaggaaggggacaccgcaccagccagggccctccccagacagggacagcagccctgcaggcaggctggcccctcaccctgcccagagcaggactcacgccgtccaccgcctccaggtccaggcgcagctgactctgcagcgagtgcagcttcggcaggggaatggtgccgatgtccccacagccccgcagccccggcagtgtggaggctacgcccaggccctccagctcctcctgcagctgcttcacctgtgcctccacctcctccttcttctgcagcgccagctgccggtcgctatcggccacacgggcacgctccttggcctcctgcgcctctcgctgccaggcatcgcagacctgaaacccagggcccgtctcagcaccccccacctcacctgtgccacctgcagaccctcttgcctgtgtcaccagcgatcctcccctcccctccccagcatcagctgtggccccctcacctgagacccctgcggccctccctccctccctccctccctccctccccctcccgtctcaccccccacacgctcacctgagtcacctgcggccctccctccctcccctcccatctcacccccacacgctcacctgagtcccctgcggccctccctccccctcacctgtctggcccccccacacactcacctgcttcacctgctgccaggactcctcccactgccggatcttcctcttggcctcgtccagctgccgcctgacccgggccagctcagctccgtttggacttgcactcgaagaggatggggggccggcactcaggatgggggaggggctgggggagaagctgccggaaacaaagtcccagatgctcccggggacaccgttcaaacctgagtgtgaaacggtcgatgacggcccagccctgctgtgctcgcggcctggtgggattggtgggtgctatgccccaggccccaccgctacgtgggcaccctctggggctcacctgccctggcagcaggggtgcagccacgcctgccccttgccccactcctggaccccaccaggctcaggaagaggcgctgacagtgacacctgccccggccggtctccccaccagatctacgccttcctggccacctgaggagtctaaacagagaggaattaaattcaagttcctgggaccacaccatgaggtgggaggggcagtggttctcagactccactcccaggaacccctcacacactgagactctcaaagaccccacagagctgtgtccatgtggtgactgccaatgtctatgcagctttagagactatgactgaaatagtttaaatgttacttaaaaaaaacaggccgggcgcggtggctcacgcctgtaatcccagcactttgggaggccgaggcgggtggatcatgaggtcaggagatcgagaccatcctggctaacaaggtgaaaccccgtctctactaaaaatacaaaaaattagccaggcgtggtggcgggcgcctgtagtcccagctactcgggaggctgaggcaggagaatggcgtgaacccgggaagcggagcttgcagtgagccgagattgcgccactgcagtccgcagtccggcctgggcgacagaatgagactccgtctcaaaaaaaaaaaaaaaaaaaaaaaaaaacaggcctgtcatcccagcactttgggaggtcgaggccagcagatcacttgaggtcaggagtttgagaccagtatggccaacatggtgaaactccatctctactaaaaatacaaaaattagcctggcgtggtagcaggtacctgtgatcccagctactcgggaggctgagacatgacaatcattttaacccggaaggcagaggctgcagtgagccaagattgctggagcctggacgacagagtgaaactttgttttaaaaaaataaaaacttttaaaattttgtatttttttgtagactcaggagtctcactatggtgcctagcctggtcttgaacccctggcctcaagtgaccacccacctcgacctcccaaagtgctgggattacaggcttgagccactatgttggcccaaagtattagttttttttttttttttttttttttttttgaaatggagtctagctctatcgccaggctggattggagtgcagtggcacaatctcagctcactgcgacctccgactcccgggttcaagcgattctcctgccttagcctcccaagtagctgggattacaggcatgtgccaccacgcccgcctaatttttgtatttttagtagagacggggtttcaccatgttggccaggatggtctcgatatcctgacgtcgtgatccgcccacctcggcgccccaagtgctgggatgacaggcgtgagccaccacgccgggcctttttctcttttttttttttgagatggagtttcactctt

SEQ ID NO: 22 - DNA, 2505 bp, homo sapien
gagaccatggcgggtagcagcactgggggcggtggggttggggagacgaaggtgatttaccacctggatgaggaagagactccctacctggtgaagatccctgtccccgccgagcgcatcaccctcggcgatttcaagagcgtcctgcagcggcccgcgggcgccaagtactttttcaagtctatggatcaggatttcggggtggtgaaggaagaaatttcagatgacaacgcccgcctcccctgcttcaacggaagggtggtatcctggctggtgtcctcagataatccccaacccgagatggcccctccagtccatgagcctcgggcagaactggcgcctccagccccacctttacctcctttgccacccgagaggaccagcggcattggggactcaaggcctccatctttccaccctaatgtgtccagcagccatgagaatctggagcctgagacagaaaccgagtcagtagtgtcactgaggcgggagcggcctcgcaggagagacagcagtgagcatggcgctgggggccacaggactggtggcccctcaaggctggagcgccacctggccggatacgagagctcctctaccctcatgaccagcgagctggagagtaccagtctgggggactcggacgaggaggacaccatgagcaggttcagcagctccacggagcagagcagtgcctcccgcctccttaagcgccaccggcggcgaaggaagcagaggccgccccgcctggagaggacgtcatccttcagcagcgtcacagattccacaatgtctctcaatatcatcacagtcacgctaaacatggagaagtacaacttcctgggtatctccattgttggccaaagcaatgagcggggagacggaggcatctacattggctccatcatgaagggtggggctgtggcggccgacgggcgcattgagccaggggacatgcttttgcaggtgaatgacatgaactttgagaacatgagcaacgatgacgctgtgcgggtgctgagggacattgtgcacaagcctggccccattgtgctgactgtggccaagtgctgggatccctctcctcaggcctatttcactctcccccgaaatgagcccatccagccaattgaccctgctgcctgggtgtcccattccgcggctctgactggcaccttcccagcctatccaggttcctcctccatgagcaccattacatctggatcgtctttgcctgatggctgtgaaggccggggtctctccgtccatacggacatggcatcggtgaccaaggccatggcagctccagagtctggactggaagtccgggaccgcatgtggctcaagatcaccatccctaatgcctttctgggctcggatgtggttgactggctctaccatcacgtggagggctttcctgagcggcgggaggcccgcaagtatgccagcgggctgctcaaagcaggcctgatccgacacaccgtcaacaagatcaccttctctgagcagtgctattacgtcttcggagacctcagtggtggctgtgagagctacctagtcaacctgtctctcaatgacaacgatggctccagtggggcttcagaccaggataccctggctcctctgcctggggccaccccctggcccctgctgcccactttctcctaccagtaccctgccccacacccctacagcccgcagcctccaccctaccatgagctttcatcttacacctatggtgggggcagtgccagcagccagcatagtgagggcagccggagcagtgggtcgacacggagtgatgggggggcagggcgcacggggaggcccgaggagcgggcccccgagtccaagtccggcagtggcagtgagtctgagccctccagccgagggggcagccttcggcggggtggggaagcaagtgggactagcgatgggggccctcctccatccagaggctcaactgggggtgcccctaatctccgagcccacccagggctccatccctatggaccgccccctggcatggccctcccctacaaccccatgatggtggtcatgatgcccccacctccacctccagtccctccagcagtgcagcctccgggggcccctccagtcagagacctgggctctgtgcccccagaactgacagccagccgccaaagcttccacatggccatgggcaatcccagcgagttctttgtggatgttatgtagcccactgtggggccaggctgggccgggcgctcctggtgtgtgactgggtgtcctggccgtcatgtgcttgctcttacagtgcctgggctcagcctaccagctgctgccatacaggagattgtggccactgtgactctcaccagcagtgcctggttcctcccccttggctcaggggtagacaagggacctttgattatttttagctttgtttttttataagcctttttgggggttaaaatagagtttcttacatttttgggaccttttttaataggcatttcctctttt

SEQ ID NO: 23 - DNA, 2376 bp, homo sapien
cggatgagggtcagggctgcgcggacccctatcccgcctgcgtcctcccggcaagcccagcgggagcgcccgctcggctgggtccccgcctccagcgcgccggggccgcccagaccctgggctcagcctcgcgccccggtgcccacctgaggaggcggcggtcccggcctcgcgtcccggatgggacggcgcgggagcaatgccagtggccccgagcgccccgggccacgcgcggggccggccagccgctctcgcgccctccccgccccctccgcgccttgcctcgccgcccgcgcgccccacccaccggccgctcctcccctctccccaccctcctcctccgccccctcccctcccccgccgcctcgcagatagctcggccgcgcgtctcagccgccggggccccgagcgcaggcggcgaggccaccacacctgcagagcgctcgggctgcctaggcggcacctcgcctcccgccgcgcaaaccccttctccccacgcgccgagtctcccatgacgcccgagccccccggccggcgacaatgaccacttccctgcaagatgggcagagcgccgcgagcagggcggctgcccgggattcgccgctggccgcccaggtgtgtggcgctgcccaggggaggggcgacgcccacgacctggcgccggccccctggctgcacgcgcgagcgctcctgccccttccggacgggacccgcggctgtgctgcagacaggagaaaaaagaaagatcttgatgttccggaaatgccatctattccaaacccttttcctgagctatgctgttctccaattacatctgtgttgtcagcagacctatttcccaaagcaaattcaaggaaaaaacaggtgattaaagtatacagtgaagatgaaaccagcagggctttagatgtacccagtgacataacggctcgagatgtttgtcagctgttgatcctgaagaatcattacattgatgaccacagctggaccctttttgagcacctgcctcacataggtgtagaaagaacaatagaagaccacgaactggtgattgaagtgctatccaactgggggatagaagaagaaaacaaactatactttagaaaaaattatgccaaatatgagttctttaaaaacccaatgtatttttttccagagcatatggtatcttttgcaactgaaaccaatggtgaaatatcccccacacagattttgcagatgtttctgagttcaagcacatatcctgaaattcatggtttcttacatgcgaaagaacagggaaagaagtcttggaaaaaaatttacttttttctaagaagatctggtttatatttttctactaaaggaacatcaaaggaaccgcggcatttgcagtttttcagcgaatttggcaatagtgatatttatgtgtcactggcaggcaaaaaaaaacatggagcaccgactaactatggattctgctttaagcctaacaaagcgggagggccccgagacctgaaaatgctctgtgcagaagaagagcagagtaggacgtgctgggtgaccgcgattagattgcttaagtatggcatgcagctgtaccagaattatatgcatccatatcaaggtagaagtggctgcagttcacagagcatatcacctatgagaagtatatcagagaattccctggtagcaatggacttctcaggccagaaaagcagagttatagaaaatcccactgaagccctttcagttgcggttgaagaaggactcgcttggaggaaaaaaggatgtttacgcctgggcactcacggtagccccactgcctcttcacagagctctgccacaaacatggctatccaccggtcccagccatggtttcaccacaaaatttctagagatgaggctcagcgattgattattcagcaaggacttgtggatggagttttcttggtacgggatagtcagagtaaccccaaaactttcgtactgtcaatgagtcatggacaaaaaataaagcactttcaaattataccagtagaagatgacggtgaaatgttccacacactggatgatggccacacaagatttacagatctaatacagctggtggagttctatcaactcaataagggcgttcttccttgcaagttgaaacattattgtgctaggattgctctctagacaagccagaagtgacttattaaactattgaaggaaaaggactcaagaaaaataataaaagaccataaataagggcgaaaacattatcatgtgaaaagaatgtatttcacctgcaagttacaaaaaaatagtttgtgcattgcaaataagcaaagacttggattgactttacattcatcatttaaaattcattagttaaaattaaaccttagg

SEQ ID NO: 24 - DNA, 3933 bp, homo sapien
gccgctccgggtacctgagggacgcgcggccgcccgcggcaggcggtgcagcccccccaccccttggagccaggcgccggggtctgaggatagcatttctcaagacctgacttatggagcacttgtaacctgagatatttcagttgaaggaagaaatagctcttctcctaagatggaatctgtggtttgggaatgtggttgatcaacttgatatgttggccaaatgtgccccatgtaataaaatgaaaagaagagacaagatgatgtcattttcccatattgtgaaaccaaaaacaaacgccttttgtgagaccaagctaacaaacctctgacggtgcgaagagtatttaactgtttgaagaatttaacagtaagatacagaagaagtaccttcgagctgagacctgcaggtgtataaatatctaaaatacatattgaataggcctgatcatctgaatctccttcagacccaggaaggatggctatgacttggattgtcttctctctttggcccttgactgtgttcatggggcatataggtgggcacagtttgttttcttgtgaacctattaccttgaggatgtgccaagatttgccttataatactaccttcatgcctaatcttctgaatcattatgaccaacagacagcagctttggcaatggagccattccaccctatggtgaatctggattgttctcgggatttccggccttttctttgtgcactctacgctcctatttgtatggaatatggacgtgtcacacttccctgtcgtaggctgtgtcagcgggcttacagtgagtgttcgaagctcatggagatgtttggtgttccttggcctgaagatatggaatgcagtaggttcccagattgtgatgagccatatcctcgacttgtggatctgaatttagctggagaaccaactgaaggagccccagtggcagtgcagagagactatggtttttggtgtccccgagagttaaaaattgatcctgatctgggttattcttttctgcatgtgcgtgattgttcacctccttgtccaaatatgtacttcagaagagaagaactgtcatttgctcgctatttcataggattgatttcaatcatttgcctctcggccacattgtttacttttttaacttttttgattgatgtcacaagattccgttatcctgaaaggcctattatattttatgcagtctgctacatgatggtatccttaattttcttcattggatttttgcttgaagatcgagtagcctgcaatgcatccatccctgcacaatataaggcttccacagtgacacaaggatctcataataaagcctgtaccatgctttttatgatactctatttttttactatggctggcagtgtatggtgggtaattcttaccatcacatggtttttagcagctgtgccaaagtggggtagtgaagctattgagaagaaagcattgctgtttcacgccagtgcatggggcatccccggaactctaaccatcatccttttagcgatgaataaaattgaaggtgacaatattagtggcgtgtgttttgttggcctctacgatgttgatgcattgagatattttgttcttgctcccctctgcctgtatgtggtagttggggtttctctcctcttagctggcattatatccctaaacagagttcgaattgagattccattagaaaaggagaaccaagataaattagtgaagtttatgatccggatcggtgttttcagcattctttatctcgtaccactcttggttgtaattggatgctacttttatgagcaagcttaccggggcatctgggaaacaacgtggatacaagaacgctgcagagaatatcacattccatgtccatatcaggttactcaaatgagtcgtccagacttgattctctttctgatgaaatacctgatggctctcatagttggcattccctctgtattttgggttggaagcaaaaagacatgctttgaatgggccagtttttttcatggtcgtaggaaaaaagagatagtgaatgagagccgacaggtactccaggaacctgattttgctcagtctctcctgagggatccaaatactcctatcataagaaagtcaaggggaacttccactcaaggaacatccacccatgcttcttcaactcagctggctatggtggatgatcaaagaagcaaagcaggaagcatccacagcaaagtgagcagctaccacggcagcctccacagatcacgtgatggcaggtacacgccctgcagttacagaggaatggaggagagactacctcatggcagcatgtcacgactaacagatcactccaggcatagtagttctcatcggctcaatgaacagtcacgacatagcagcatcagagatctcagtaataatcccatgactcatatcacacatggcaccagcatgaatcgggttattgaagaagatggaaccagtgcttaatttgtcttgtctaaggtggaaatcttgtgctgtttaaaaagcagattttattctttgccttttgcatgactgatagctgtaactcacagttaacatgctttcagtcaagtacagattgtgtccactggaaaggtaaatgattgcttttttatattgcatcaaacttggaacatcaaggcatccaaaacactaagaattctatcatcacaaaaataattcgtctttctaggttatgaagagataattatttgtctggtaagcatttttataaacccactcattttatatttagaaaaatcctaaatgtgtggtgactgctttgtagtgaactttcatatactataaactagttgtgagataacattctggtagctcagttaataaaacaatttcagaattaaagaaattttctatgcaaggtttacttctcagatgaacagtaggactttgtagttttatttccactaagtgaaaaaagaactgtgtttttaaactgtaggagaatttaataaatcagcaagggtattttagctaatagaataaaagtgcaacagaagaatttgattagtctatgaaaggttctcttaaaattctatcgaaataatcttcatgcagagatattcagggtttggattagcagtggaataaagagatgggcattgtttcccctataattgtgctgtttttataacttttgtaaatattactttttctggctgtgtttttataacttatccatatgcatgatggaaaaattttaatttgtagccatcttttcccatgtaatagtattgattcatagagaacttaatgttcaaaatttgctttgtggaggcatgtaataagataaacatcatacattataaggtaaccacaattacaaaatggcaaaacattttctctgtattcattgttgtatttttctacagtgagatgtgatcttgccaaagccaccagaccttggcttccaggccctcctgtagtgagttgattgtctgcacttgccttgcccaatagccagtaggctacagcttttgccccacacccttattttcagattctggatcattcttgtttacaactgaaatatatataacctcagtccaaagtggtgattgatttgagtatttgaaaattgttgtagctaaatgaagcatgattagtcttagtatgaatatcatttaatctttaaaaaatcaagtaaaaatgtttatctgataatgtttaaataatttacaatataaactgtaaaacttattaggcatgaaatcaatcagaagagaaagaaaaatgctggaacatgcttgatgtattatgtaaaaagcatatttaaacaagggtcctcaaccctgactgcagataagaatcacttgggttacttcagatgcctaacaccttcctctcatacaaataagaattggtagctttcttaaaaaaaaaaaaaaaaaaaaaaa

SEQ ID NO: 25 - DNA, 5039 bp, homo sapien
aaacgattgaagttgaagaacaacaggaaggcaatgatgcagaggcccagaggcgtgagattgagctgcttcgccgtgagggagaattgccactggaagagctgctccgttcccttccccctcagctgttggaagggccttccagcccctctcaaaccccctcatctcatgatagtgacacccgagatgggcctgaagaaggtgctgaagaagagccccctcaggtgttggagataaagcccccaccctctgctgtcacacagcgcaacaaacagccttggcatccagatgaagatgatgaagagtttactgccaacgaagaggaagcggaggatgaagaggatactatagcagctgaggaacagttggaaggggaggtggatcatgccatggagctgagcgagttggctcgagaaggtgagctttccatggaggagctattgcagcagtatgcaggagcctatgccccaggctctgggagcagtgaagatgaggatgaagatgaggttgatgctaatagctctgactgtgaaccagaggggcccgtggaagcggaagagcctcctcaggaggatagtagcagtcagtcagactctgtggaggaccggagtgaggatgaggaagatgaacattcagaggaggtagaaacaagtggaagttcagcatcagaggaatctgagtctgaagagtctgaggatacccaatcacagagccaagcagatgaagaggaggaagatgatgattttggggtggagtacttgcttgccagggatgaagagcagagtgaggcagatgcaggcagtgggcctcctactccagggcccactactctaggtccgaagaaagaaattactgacattgctgcagcagctgaaagtctccagcccaagggttacacgctggccacgacccaggtaaagacgcccattcccctgcttctgcggggccagctccgggagtaccagcacattgggctagactggctggttaccatgtatgagaagaagcttaatggcattcttgctgatgagatggggcttgggaagaccatccagaccatctctctgcttgcccacttggcttgtgagaaaggtaactggggtccccatttaatcattgttcccaccagcgtgatgttgaactgggagatggagttgaaacgttggtgccccagctttaaatcctcacttactatggagcccagaaagagaggaagctcaagcggcagggctggaccaagcccaatgcctttcatgtgtgtatcacatcttacaagctggtgctgcaggaccaccaggccttccgtcgcaagaactggcgctatctcattctggatgaggcgcagaatatcaagaacttcaagtcacagcgctggcagtcactcctcaacttcaacagccagagacgcctgctcctgacaggaactcccttgcagaacagcctcatggagctgtggtccttgatgcactttttgatgccccatgtcttccagtctcatcgcgagttcaaggagtggttctctaatcccctaactggcatgattgagggcagccaagagtataatgaaggtctagtcaaacgcctccacaaggttttgaggccttttttactgcgccgagttaaggtggatgttgagaagcagatgcccaaaaagtacgagcatgttatccgctgcaggctctccaagcgtcaacgctgtctctatgatgacttcatggcacagaccacaactaaggagacactagccacaggccatttcatgagcgtcatcaacattttgatgcagctgagaaaagtttgcaatcatccaaatctgttcgaccctcgaccggttacctcccctttcatcaccccaggcatctgcttcagcaccgcctctctggtgctaagggccacggatgtccatcccctccagcggatagacatgggtcgatttgaccttattggcctggaaggtcgtgtctctcgatatgaggcagacacatttctgccccggcaccgcctctctcgccgggtactgttagaagtggctactgctcctgaccccccaccccggcccaagccagtcaagatgaaggtcaacaggatgctgcagccagtacctaagcaagaaggccggacagtggtggtggtgaacaacccacgggcgcccctgggccctgtcccagttcgacctcctccaggtcctgagctctcagcccagcccacccctggcccagtcccccaagtgctgccagcatcactgatggtttcagcctcacctgccgggcccccgcttattcctgcatctcggcctcctggccctgtcctcttgcctccactgcagcccaacagtggttctctcccccaggtgttgccatcccccctgggggtcctgagtgggacctcacggcctcccacgccaaccttgtccctaaagccaacaccacctgccccagttcgcctgagcccagccccacctccaggctcctctagcctgttgaagcccctgacagtgccaccaggctacaccttccctcctgctgctgtcaccaccacttctaccaccgcggcaactgctaccaccacagcagtgcctccgactcctgcaccacagcgcctcattctatctcccgatatgcaggctcgcctgccctcaggcgaagtggtcagcatcgggcagttagcctcactggcacaacgtccagtggctaatgcagggggaagcaaacctctcaccttccaaatccagggcaacaagctgactttgactggtgcccaggtgcgccagcttgctgtggggcagccccgcccgctgcaaaggaatgtggtgcacctcgtgtcagcaggggggcagcaccatctcatcagccagcctgcccatgtggccctcatccaggccgtggccccgacccctggccctacccctgtctctgtgctgccttcttcgacccccagcaccacccctgcccctactggcctcagccttccgcttgctgctaaccaggtgccaccaaccatggtgaataatacaggcgtggtgaagattgtagtgagacaagcccctcgggatggactgactcctgttcctccattggccccagcaccccggcctccgagctctgggcttccagctgtgttgaatccacgccccacgttaacccctggccggctacccacacctactctgggtactgctcgagcccccatgcccacacccactctggtgaggcctcttctcaagctggtccacagtccttcacctgaagtcagtgcttcagcccccggagctgcccccttgaccatctcttctcctctccacgtgccatcctcactccctgggccagcctcttctccaatgccaattcccaactcctctccccttgctagtcctgtgtcctctacagtctcagttccattgtcatcttcactccccatctctgtccccaccacacttcctgccccagcctcggctccactcaccatccccatctcagcccccttgactgtttctgcttcgggcccagctctgttgaccagtgtgactccaccattggcacctgttgtcccagcggctcctggacctccatccttggcaccatctggtgcttccccgtcagcatcagccttgactctaggtttggccacagctccatccctgtcttcatctcagacacctggtcaccctctgttgttggctcccacctcttcacatgttccagggttgaactcaaccgtggccccagcatgctcacctgtcctggtgccagcttcggctctggccagcccttttccgtcagcaccaaatccagctccagctcaggcttcccttctggctccagcatcttctgcatctcaggctctagccacccctctggctcctatggcggctccacagacagcaattctggctccttctccagctcctcctctggctcctcttccggtcctggcaccatcgccaggtgctgctcctgtcctggcttcatcacagactccggttccagttatggctccatcgtctactccaggaacctctttagcctcagcttcaccggtaccagctccaacccctgtgttggctccatcatcaactcaaactatgctaccagccccggttccgtcacctctcccgagcccggcttctacgcagacactggccctagccccagctttagcacccactcttggaggctcatctccatctcagacactctctttgggaacggggaacccccagggaccctttccaactcagacattgtcattaactccagcatcatccctggtaccaactccagcccagacactgtctttggcaccaggaccaccactgggtccaactcagacgctgtctctggctccagcaccccctctggctccagcttctccagtgggcccagccccagctcacacgctgactttggctccagcatcgtcatctgcttcactcctggccccagcttcagtgcagacactgaccttgagccctgccccagttcctaccctgggcccggccgcagctcagaccttggcgctggccccagcctccacacagtccccagcttcccaggcatcttcccttgtggtttcggcatctggtgccgctcccttgcctgtcaccatggtatcccggctgcctgtttccaaggatgagcctgacacactgacattgcgctctggtccccccagccctccctccactgctacctcgtttggtggcccccggcctcgacgccagccccccccaccacctcgttcccctttttatctggtaagttttacttcctcaagagggaacaggaagttgagtttctttggagtgttggtagggtggatggaacagtgatgtcacatttaacctggtgaattacaaagcttaatgttatggaccaagtacttgagtgacatttggacaagtcccttctcttccctgggcgtgtacctcatgatccgcctgcctcagcctcctgaagtgttaggattacaggggtgagccaccacgcccggcctcttttcccgttttttaacccgcacggtaataaatgggcagtaaaagg

SEQ ID NO: 26 - DNA, 6996 bp, homo sapien
atggaccaaggcccttggcggtgcgttgcgcacccccggggcgccgcgactgaagtagcaatggacgcgctggagtcgttgttggacgaagtcgctctggaggggctcgatggcctgtgtctgccagcgctgtggagccggctggagacgcgagtgccgcccttcccgctgcctttggaaccctgcacgcaggagtttctctggcgggccctcgccacgcacccgggcatcagcttctatgaggagcctcgggagcgacccgacctacagctccaggaccggtatgaagaaattgatttggaaactggaattttggagtctaggagggacccggtggctttggaggatgtctaccccattcatatgatcttagagaataaggatggcatccagggctcatgccgctactttaaggagaggaaaaacattaccaatgacatcagaaccaagtccttgcagcctcgctgtacaatggtggaaccctttgacaggtgggggaagaaactgatcatcggttccctcccagcccatgcggtacaggcccttgatagcccaggagggggatcccgacctgaagctgcccgacttctcctactgcatcctggaacggctaggccggtccaggtgcaaggggagctccagcgagaccttcacaccactgctttcaaggttgatgctgggaagctgcactatcacagaaaaattttgaacaaaaacgggctgattacaatgcagtcccatgtgatccgattacccactggagcccagcaacactcaatcctcctcctactgaaccggtttcatgtggacaggaggagcaaatacgacatcctcatggagaagctttcggtcatgctgagcacacggactaaccacatagagacgctgggaaagctgagggaagagctggggctgtgcgaaaggacgtttaagcgtctgtaccagtatatgctgaacgccgggctagccaaggtggtgtctcttcgcttgcaagagatccaccctgaatgtggaccttgtaagacaaagaaagggaccgacgtcatggttcggtgcctcaagctgctgaaggaatttaaacggaatgaccatgatgatgacgaggacgaggaggtcatctccaagacagtgcctccagtggacattgtgttcgagcgggatatgctcacacagacctacgacctcattgagcgcagaggcacgaaaggaatttcccaagctgaaatccgagtggctatgaatgtgggaaaactagaagcaagaatgctgtgccgacttcttcaaagattcaaagttgtcaagggattcatggaagacgaaggtcggcagcgaaccaccaagtacatttcctgcgtgtttgcagaggagagcgacctaagccggcagtaccaaagagagaaggcccgcagcgagctcttgaccaccgtgagcctggcgtctatgcaggaggagtcgcttctgcctgaaggcgaggacaccttcctctctgagtcggacagtgaggaggagaggagcagcagcaagcggagaggcagagggtcccagaaagacacaagagcctctgcaaacctccggcccaagacccagcctcatcactccaccccaaccaagggtgggtggaaagttgtaaacctacacccattgaaaaagcagccgccctccttcccaggagctgctgaagagagagcctgccagagccttgccagcagggacagcctcttagataccagcagcgtctcagaacccaacgtgtcctttgtctcccactgtgcggacagcaacagtggtgacatagctgtgatcgaggaggtccggatggaaaacccaaaggagagtagcagttccctgaagactgggaggcacagctcaggccaagacaaaccacacgaaacttaccgactgctgaaacgcaggaatctgatcatagaagctgtcaccaatcttcgcttaatcgagagtttattcacgattcagaagatgatcatggatcaggagaagcaggaaggcgtgtccaccaagtgctgcaagaagtccattgtccgcttggtgcggaacctgtctgaggaaggtctcttgcgattgtatcggaccactgtcattcaagatggcatcaagaagaaggtggatctggtggtgcacccgtccatggaccagaacgaccctctagtgagaagtgccatcgagcaggtccgcttccggatctccaattcaagcacagccaacagggttaaaacttcccagcctccagtgccccaaggggaggcagaagaagacagtcaaggaaaagagggcccaagtggatcaggggactctcagctgagtgcttcctctagatcagaaagtggacggatgaaaaaaagtgataataaaatgggcataaccccgcttagaaattatcaccccattgtagttcccggactggggcgttctctaggatttctgcccaaaatgcctcgcctgcgggtggtccacatgtttctgtggtacctcatctacgggcaccctgccagcaacaccgtggagaagccaagcttcatcagtgaacggagaacgataaagcaggagtcaggcagggcaggcgtccggccgtcctcctctggaagtgcctgggaggcctgctctgaagccccatctaaaggcagccaagatggtgtcacctgggaggctgaagtggagcttgccacggagacagtgtatgtcgacgatgcctcgtggatgcgctacatccccccaatcccagtccacagggacttcggctttggctgggctctcgtcagcgacatcctcctctgccttcccctctccatcttcatccagattgtgcaagtcagctacaaggtggacaacctggaggaatttctgaacgacccgctgaagaagcacacgctgatccgctttctccccaggcccattcggcagcagcttctgtacaagaggcgttacattttttcggtggtggagaaccttcagaggctgtgctacatgggggtgctacagtttggtcccacggaaaagtttcaggataaagatcaggtctttatcttcttgaagaagaatgcagtcattgttgacactaccatctgcgacccacattacaacctgggccgcaggaggcggcccttcgagaggcgcctctatgtcctgaactcaatgcaggatgtggaaaactactggtttgacctgcagtgcgtctgcctcaacaccccactaggcgtggtgcgctgcccgcgcgtcaggaagaacagcagcacagaccagggcagcgacgaggagggcagcctgcagaaggagcaggagagcgccatggacaagcacaacctggagcgcaagtgcgccatgctggagtacaccactggaagccgtgaggtggtggatgaaggcttgatccctggagatgggctgggtgccgcagggctcgattccagcttctacggacacctcaagcgcaactggatctggaccagctacatcatcaaccaggccaaaaaggagaacactgccgcagagaatggactcacagtgaggctccagacatttctgtccaagcgcccaatgcccctcagtgccagaggcaacagcaggttgaatatttggggggaagcaagagtaggctccgagctctgtgctggctgggaagagcagtttgaggtggaccgagagccctcgctggaccgaaaccggagagtgaggggtgggaaaagccagaagcggaagcggctgaagaaggaccctgggaagaagatcaagagaaagaagaaaggagagttcccaggagaaaaaagcaaaaggctgcgctaccatgatgaagccgaccagagtgccctgcatcggatgacgcggcttcgtgtcacctggtctatgcaggaggatgggctgcttgtgctgtgccgcattgccagcaatgtcctcaacaccaaggtgaagggtccatttgtcacctggcaggtggtacgggacattttgcatgccacgtttgaagagtctttggataaaacatctcattcccttggacgaagagctcgctacatagtcaaaaacccacaggcctatctcaactataaagtgtgcctggccgaggtgtaccaggataaagcacttgttggagatttcatgaatcgaagaggtgactatgatgacccaaaggtttgtgccaacgagtttaaagaatttgtggagaagcttaaagaaaagttcagttcagccctaaggaattctaaccttgaaatcccagacacactccaggagctgttcgccaggtaccgagttttggcaattggggatgaaaaagatcaaaccaggaaagaggatgaacttaacagcgtggatgacatccactttctggtgcttcagaacctgatccagagcacgctggccctctcagacagtcagatgaagtcctaccagtcattccagactttccgcctctatcgggagtacaaggaccacgttcttgtgaaggccttcatggagtgccagaagaggagcttggtcaaccggcgccgggtcaaccacacgctgggccccaagaagaaccgggccctccccttcgtgccaatgtcctaccagctatcccagacctactacaggatttttacgtggcgatttccaagcaccatctgcacggagtcattccagtttttggacagaatgcgggctgccggcaagttggaccagcctgatcgtttctctttcaaagaccaggataataacgagcccacaaacgacatggtggccttttcactggacggccctggaggaaattgtgtggccgtcctgaccctcttctctctgggcctcatttctgtggatgtcaggatcccggagcagatcatcgtggtagacagctcaatggtggagaatgaggtcatcaaaagcttggggaaggacggcagcctggaggatgacgaggatgaagaggatgacttggacgaaggtgtagggggcaagcgccggagcatggaggtgaaacctgcgcaagcctcccacaccaactacctgctgatgaggggctactactcccccggcatcgtcagcacccgcaacctcaaccccaacgacagcattgtggtcaactcctgccagatgaagttccagctccgctgcacccctgtgcccgcccggctcaggcccgctgccgctcctctggaagagctaacaatgggaacctcctgcctccctgatacgttcaccaagctgataaacccccaggaaaacacctgcagcttggaggagtttgtcctccagctggagctgtctgggtatagtcccgaagacctgactgctgccttggagatcttggaagccattatagccacgggttgttttgggattgacaaggaggagctgcgcagacggttctcggccttggagaaggcaggtggtgggcgcaccaggacattcgcagattgcatccaggccctcctggagcagcatcaggtgctggaggtcggtggcaacactgcgcgcctggtagccatgggctctgcctggccttggctcctgcactccgtgcggctgaaagacagagaagacgccgacatccagagagaagacccccaggccagacccctggaggggtcttccagtgaggacagcccccccgaggggcaggcacctccttctcacagcccccggggcaccaagaggcgcgccagctgggccagtgagaatggggagaccgacgccgagggcacccagatgacccctgccaagaggccagcgctccaggactcaaatttggcccccagccttgggcccggagctgaagatggggcagaagcccaggccccatctccacccccagctcttgaagacaccgctgcagcgggagcagcacaggaagaccaagagggtgtcggtgagttcagttccccaggccaagagcagctgagcggccaggcgcagcctccagagggctctgaagaccccagagggttcacagagagtttcggagctgccaacatctcccaggcagcacgggaaagggactgtgagagtgtctgcttcatcggccggccgtggcgtgtcgtggatggccacctgaaccttcctgtatgcaagggtatgatggaggccatgctgtaccacatcatgaccaggcctggcatccccgagagctccctgctgcgccactaccagggggtcctgcagcccgtcgccgtgctggagttgctccagggcctggagtccctcggctgcatccggaagcgctggctgagaaagccaaggcctgtctcgctcttctctacacccgtggtggaagaggtggaagtgccctccagcctggacgagagccccatggctttctatgagcccaccttggactgtaccctccggctgggccgtgtgttcccccacgaggtcaactggaacaagtggatccacctctaggacccctgtgggcgtcccctccctcccagccaccgcctgccacaccactcctgcctggtgctcggcagaccccactgtgccctggccttgggtctgccgagcctcctgcagcaggggacgggtgctttggccagagtcacagactgacacgtttcccactgtactggaactctggaaagaggggctccccgacctgcccatcccccaggctcttctgggccttccccttgggaactggcctcatcacactgggagttggtgcttcttgtctctgggtctccagagtttgccccgcctgtgcacacctcacattccagactctagccatctcggcaggatctcctggctccttgagtgcccaggtgccaccaagaggaagggccttgtgggatacaccttgcagaatagggatcggtgtgccccgctgcgaggggccccccatgggggctgtggcccctccgcaggcaggacatcccaacccctggctgggactgaaccacccagagcggagcggctcccttttcagccttgtgagtcacctggcaggccccagctgggctggctgtccgtgtccctcagcctggctggtgattccttgcaggaggg

SEQ ID NO: 27 - DNA, 881 bp, homo sapien
atgcgtatccccgtagatgccagcacgagccgccgcttcacgccgccttccaccgcgctgagcccaggcaagatgagcgaggcgttgccgctgggcgccccggacgccggcgctgccctggctggcaagctgaggagcggcgaccgcagcatggtggaggtgctggccgaccacccgggcgagctggtgcgcaccgacagccccaacttcctctgctccgtgctgcctacgcactggcgctgcaacaagaccctgcccatcgctttcaaggtggtggccctaggggatgttccagatggcactctggtcactgtgatggctggcaatgatgaaaactactcggctgagctgagaaatgctaccgcagccatgaagaaccaggttgcaagatttaatgacctcaggtttgtcggtcgaagtggaagagggaaaagcttcactctgaccatcactgtcttcacaaacccaccgcaagtcgccacctaccacagagccatcaaaatcacagtggatgggccccgagaacctcgaagacatcggcagaaactagatgatcagaccaagcccgggagcttgtccttttccgagcggctcagtgaactggagcagctgcggcgcacagccatgagggtcagcccacaccacccagcccccacgcccaaccctcgatgcctccctgaaccactccactgcctttaaccctcagcctcagagtcagatgcaggctcatctttctccctaattcatcccaggacaagcctaggaaaccctggtgttacctccaagaggaaagacatacacatcaaatgcagcggtatgctgataaatgttacccctggatccccagaaaataaataaagtcccaatttatagaaaaaaaa

SEQ ID NO: 28 - DNA, 1472 bp, homo sapien
cgccaagcttggcacgaggaaaaagccaagatttcattgtttgttgaatatttcttaagcatctggcccctaaagagaccgcttcttaccaagcctgtaaactatgcatgatggaaattcttgtattttatttaggaatggctgttggtttactcaccacatctgtggaatcatggctataaatgtttgcttacaaactctttgtgacttgtaatttaacttaatctcatctaatgtaaatattagattatgatgttcagtaacatcttccataggtataaactgctgtcattattgatttcagagtaactctgagtaatcaaataggtaaaagcatgttttgagtaaaatagctagatttatactttacttgtatacagacttaacaacaaccggtattgactggattgacagctaaagtatcagaatgaaagcaaggtttttttgatgttacctgactgtcataaagatgaaaatgatttgtattggtatgaaatgcttatctttattctacttcgtaagggtaagttttatttatactctttggactcccatgaacttttgcacactgctttgtgtttttggtttaccctaaactaccatcctttttatctttgctttttttcttcctattcagaaaagagcaaaatgtgaaaagacacaagactctcaggtatagaatgaactgagcaatttggagaatgtattggactttgtcctctcttattcccccctcctagccctgcaagttgctaggtacttgtgaggcagtgtactggagaggggagagcatggatcctggggtcaaagggcctttgcccccacccttacttggccctctacctgcaggtgaccactggcacattctcctgcttgtctcagcttcaggttcttcacctctaagatggggatgatgaaaacagtacctgtcatgcagaattgttgggaggattgataatttagatgtttatacatgtaatgtacttagatcagtgtctgctcttttcacttgatatccagtactatgtaagatagaaggtgcatgtcttctgtattctgtatttcccatttcttttgcgtgcagtctttgattcgtacaatagaaggaacacgtagaatgtatatttgtacattcatgtcaacatagtatttgaaattgctaccaaactcatttaatttggcataagactaacagatgaagtctctcatttgcttgaagatattttacaaaataccaactgttctatatttctttagaaaaagattatagttattaatattgatacctctgataatattttattcttaaatcttcagtgattccttttactatagattcatgacagctaattagtactaactgatttagaggtttcctttcccatcatatggaatgatgtaaagaaatcagatacaaactactgcaattagaaaataaaatatgaacaactttcaaaaaaaaaaaaaaaaaa

SEQ ID NO: 29 - DNA, 172616 bp, homo sapien
gaattcactaacaggaaatcagcactaaaataaatgttaagagaagtgatttaggcagaaggaaaatgatactggacctacatagaagaatgaagagcaccttaagtggtaactacataggtgaaaataaacaattttttcttttatttaattctcattaaaaaaatcaattaaccaaaaataataagaatgtacaggggaattataatatatgtatacgtaagataaatgataccaatagcataaagaccagaaggtaaaaaatggaaatatacagctgtaagtttcttcactatcaatgaaatagtagaaggaaggaagactatcaaaagttaaatatgcacactgaaaacacaaatgcaaccactaaaataaggaaacatatatgcctaataagacaacaatggagataaaatggaatcatggaaaaacattcaaataatcaagagaaagtagaaaaggagggagatagaaaaaaacaggtgaaacaatagaaaacaactaccaagttgatagacttaaacctaaccatatcaataatcacataaaatataaatgttctaaagactccagttgaaaggcaaaggttgtcaggttgagtaaatacccaagaccctactctatgctacctgtaaaagaaaacagaacattaaatataaaaacacaaataggttaaacatttaaaaatggagagtgatattggcaggaatggtagactaagaacctctaacaatcctgtcctccataaaagcaataagatcaaatttatcaaaatcaccttttttagaactatagaaattaagcaaaagcttgcaacaatctagcaagtagacatttaagaaaatggcagaatctctataataacagtaagttttatggctttttagcttgccctgtctccttctccctcttactagatctgtaggtagccttgaaaaacaagagccctacagtcacggcaaaacagtagcctaaaagccactggacagcacagttcaggtttgcaggtccttcaaatccccattcccaaaaattggcattatttgagttgtttggaatcccctggaaaatcctattacaaggcatttgtattagcctgactgacatctcactcagtaaaaagaatcttttcaccataagcatttgataaaaacaaacaaacaaacaacaacaacaacaaaacagagacagttgtttaacaaaacagtttcctgagggagtgataacagtttgggcaaacaagaaactcaccaaaaaactttaaaagttgagcaatgacatgtccatatttgggctttgaaaacctttcacatattcctgaaaatctaaagaccacatgcattgaagggctgtgcacatgcccagaaaagaactcagaagcccttaagctcttacctgtgactgaccttgaggttctgcatgagcaggaagcaaaggctaaggtggagttgtaaactgcctgcctgaccattgaaggagtaccccaacactcacacagagacctcagcaaaagatgggagaattattggtttcagtaatataaggacacctttgtccaatcattgatcaccaagctaactgagcagagacttcagtggccacacatgaaaaggaatacagacttaaagaatgtgtacaggaatgtcactaaacaaacaaatagcaacaacaaactctgggaagggaagtcaccacctttttttttttaatttttattttttgagacagaatctcactctgtcacccaggctagagtacagtgacacaatcagagttcacggcagccttgaccttccaggctcaagcaatccttccacctcactcctccaagtagctgggactgcaagcatgtgtcaccacactctgccaatttatattattttaaatgttcaatctataactaagaaattacggcatgtaaagaaaaaaagaaagagtgattaatatgcagcaaaaaaaaaaaaaaaaaaaaaaaaactcaatagaacctgtccctgagaaagcccaggcattggacttactagacgaagacttaaaatcagctattttatttatgttcaaagaacgaaagaaaaccatgtctcagaaatatgagatcaacatttaactaagtagagaatagcaataaaaggatagaaatattttctacagccaaacagaaattctggagttaaaaagtaaaacaactaacaagaaaaatcccctggagggtagctctcaatgggctaaagtgacacaatgtgacttctgaggccagattatacaagaggatacagcttcttcctggttctcttggggcatttccctcttggaacccatgtgctgtgaggaagccaaaaccaccacatgaagaatcagtgtttaggccctctggtcagtcaccccagtggagattccacctaacagcaacatcaaccaccagtcacgggaatcaatgatcctttagataagcttagtttcccaggtatcaaatcttccccactggtgttgcaggtactgtggaacagagacaagctgttcccacagccactttccgaatgcaaaacctacagtatatacaagcataataaaatgtttgcatcatatctctgacatttcaggtaattttttacgcagcaatagtaagcagaacaggaagccaggcaatcattgtcttcattgatttccattcacaggagtctgttattattctcaaaattattgtgaagatattttcactggggaagaaactcagaagagcaaactttatagcatgtttctgaagaggctgtacccaggaaatccattgacagagtgtgttatgaattcaacagattggtgctatggcaatgaatcaacatagaaaccaaattggatgctttcaattaaaaattcaaaatcacaaattctttcaggaacccctaaagtgaattaattcatgaagctaatatttattgacccataagaacattttttaaagcagtgccactattttattaattaccataaaattgaaaacaaaaagcagataaatcaatatccttagtttctacgaagtacaacactttatagtaaatttaactttattttctttagaatattttctcttgtatatttaattccaagctcaaaataatcataccttcgccctcacaggtgcagctgagttgaaaatacatagatgtcactttggttttcctgcttagtaagaaaagcacatattcagaaagtgaagtcataattctccagctcagttcaatataaatttattgagcacctactaagaagatggcagcagatggcttcattttctctggctatgtttacctctctgcagatatcttcacatagtcaaccttctgataggaatgaaggtgaaagggaagttcactgaaataaatgtaatggtacagccaatggacgcattcttaggcacagtctctaactggatgtaatctacccaggacaaatggtacagctttttagaagaaaccagctcactcagttaaataaacctttggggctaatggcttccctcagtctcctcattgtttccctgaattaatggaactgcctggttattttggtatcacataaatccgttctcttcatccttatcatgccagagataaaaccgttccatgttaatttatacagccatgccaggctaacaaaaagaaacgcattacagttcttgaaactctgtaagcccagaagcataaacgattttttcaatcatcatttctccacaggcaaaaaaataacaatgtactggaaagaactaattaagggggctgagacatgattcaagtcaggtcattgccatgaactagctctatgacctaagagaaggcctcctcttccttatttttgttctgactttatgattctgaactacttagcagtgtcactctggttaaatacatatgccattgcttatgattcataccaacaaatattagaaatatcaagttaaagatgaattttttttttttttttttgagacaggttctcgctctgttgccaggctggagtgcagtagcactatctcggctcactgcaacctccgcctccagggttcaagtgattctcctgcctcagcctccagagtagctaggactacaggcacacaccaccatacccagctaatttttgtaattttagtagagacggggtttcaccatgttggatgggatggtcttgatctcttgaccttgtgatcctcctacctcggcctcccaaagggctgggattacaggcgtgaatcaccatgcccagccaagatgaagtttctttttgtgaaacctgagtcataagattttaattattgatccaagtaagtgaatgctggggctaaacaaacgtgcttttagacttggcttccaaagaagctgcttatatttggcgattcataggaagttacattgcagaattaatgaaaatcatggagctagttttgactttactgctgtgactactggctcgcatggtacttttagttgcagtgattctttttgttgctttgggtaacatttcttagcttttatgatttggtttgagagaatagaagagaaaataaactaatatataccaagtgaataacactcgctgagcaacaaatctgtttctggagaagaagaaaaaaaaaacctcactactttcctgttttcaaaataactctgtggaacacagatcgttttcccaaagccaattagatcaataagtaaaaaatctgagacctgacctgggcctcctctgtggccacagagttcatttccactctgcaatgtacaatgatattggcacaatattggaacaaacattgaccttgatacaatttcctttcttcatactatgtcaccagaaggcttatttctggagctctaaattccataatattgacataatttgttgatcagatgagattattgattgatatgatatactgattcccattaaaacaaaaactgctatagcagaacatagtaagcaactaatgatgcccattttcatttcatctttgtgtgcattttatcagttctgttccagtgaacacttcaataaatgtgtatgttggaatattggaaatggtcttataaaagcactttacaaagtgatggggacacatagatgtttctggactggaaggattcatggtctagaaggtactaagagaatataaatcattaagccaggcacagtggctaccacctgtaatcccagttactcgaaaggctgaggcaaggggatcactgagctcaggagttcaagactagcctgggcaacacagtgaggccccatctctaaaaaagaagaaagaatgaaatataaatcattcctctgtaatggttcacactcaaaggtctacaataaaataatatagaaagccatgtagagacacagaagagtccaagaaagtttcaaactaggctggatgcagtggctcacagctgtaatcctagcactttgggaggccgagatgggtggattgcctgagctcaggagttcagcacaagcctgggcaacatggtgaaacccagtctctaccacacacacccacacacacacacccaaaaaaaaaactggcgtggagtggtggtgggcacctgtaatcccagctactcgggaggctaaggcacgagaatttcttgaacccaggaggtggaagttggagtgagccgagatcgtgccactgtgctcacacagcctgggtgacaaaacaaaactctgtctcaaaaaaaaaaaaagtttcaaagtaaatgacaacagaggtcattggaggattgaaatacatgctgttgcgtctctcatgaagaaatgtaaaacaaacaaacctgtattccccagggttgagagtctcaagaggggaaaaaaatgacctcaagttgggtattttgaaaatataatgtagggacaatttagaaagcatgggcagatataggaacccactaaggacgttatagtcatcaggactaattatagtcctacgatacatcaacacctctaggcctgaatggggaaaaggaaagagtggttcttgaatacgcagagagcatcacagacataactgtgcccccagtgaagggaggcagcccactatttgtgactgcgtttggaaagaagcatgaaaataaactcctccatctcactcttccctctctccctttaatctcttgctggaactccctattggccaaactcaaccagaagccagagattaaaggaaccagttgatgtagcttgaacaatccagcctcttataacagaaaggagggtagaaaatgaatctggatgggcaaattgaaagtattcagacaggaaggtagaaatgtagtttataaatgtcctgcacagcaaagaagcaggccagagcctcaggtagcaaagcttggacctgaatcctagctttctaaacatgtagcgcctttgtggagttttaaaagaaaaaaaaaaaaacaaggagcaaagatctttgagtttatgcctgaggctgatagcccgatctgcatagttcatggaaaagacttcatctttttgagttaacaatttaggggaaaatgacgacccacttctatttggagaaagagcaataatgtatttgaaagcctgttatagaatggaaaagagaacaattcagaaagctatgctcccaccatctatattcacatatatagaaaggctgccaaacaaattaccagagctgaaaagaatttgtgcaatcattacattttcttaaggctaaaaatacactttccccagaaactaaaaataataatcaaataaagacttaaaacagagaatcagagacctcagagattgccccagttgcagtcaacctttaagtgatgtcagatttaaaagttttattgtttcattgcgttaactagaaccaacaggtgcttgcatttctctttcactctctttaagccttccccaccttcatatggaaagaacgcataattttctctaggcattcatcagtaaagatgaatgaatattctatcatcagatattaaaatttaatttgtgatcccatctctagcttgtcacctcctccacagctcagagcttattgaacttcagaaacatgaagtaggaattatttttctcctccctctgtgatttccctcattcggaatctactggggctcttccagcattggagccggaggagtcaaaggacagaggatgaagggtctttgtggggtggtgctgaggtatccaggtgttgctgttttctgggtagaaatggctgcactgcagctcttccaccacatagctggaggtggctgcagggctgtcaccatcctcttagccacctattagcaagccctaccaatgggacttctctttagaatgtgttattctcagctaaaaattcaagaccagaaaagtcccatttaacattccattacagcatcattaaaactgcctgtgtgctgaagggaaaacattgaagttgtaggtgacatgatataatgattacagtattgtccttagcatagaagatctggaccccagccctggaatagttactggctgcagtagcctgaccaagttgattaatttatataggtcttagttgcttcatctgtatgatgtgtttggttggatatagagatctcaaaattctttcttatatctagtatagtatttttctatgaaattggcactgcaaatattatatacaatcatgcctcacataaaaatctttcgtcaacaatggactgcatatgatgattgtctcataagattataataccatatttttaccatacttttctgtgtttagatacacaaatacttactatcgtgttacaattgcttatagcattcggtacagtaacctgctgtatagttttgtagcctaggagcaataggctacactatataggccaggtgtgtagtatgctacaccatctaggtttgtgtaagtacactctgtaatgtttgcacaatgatgcaattgcccaatgatgcatttctcggaaagcattttctttgttaagcgatatatgactataatcccatagtactgagaaatgtcccaacccacacaacgagagagctgcacacagtattcttctgccatgtcagaatctatgtccaggcagatgtaagacacaaacctatcaaacctacggctctacacttcgtgctgttttttaaaacctctctgccaaacacatccccctctgcttccacaaacatcttttatcgacattttcttctcccatgctctgccgaatttacatgggtttctacctaagacttttcaagaagtattatcaaaaggtattcaagccagattaagaaaataaaattctcctatggactcagcctctcagaaaacataaaactctgcaatgctcagacactagtgctttctggcttgaaattgtcagtcaatccttttccatcttcctcaatgttcaactctacttttaccctgctgtaattgattaattatcaaagtaggaaaggtggacagtttgttgacagatgtttttaattgctaatttaaggagcttcatgatagaagtaaaagactcaaaaaaaaagatactaatggcattaagattgtgctaggtaaagacaacgcttgggggaggtcccattttaggggcttttcattaaattagactatagctcatgtggctagctagatgtgtaccattctaggggaatacccactgttaaatctcaatattcctttgtagtcaaataggtcccagaaacacaacgtaaaacttacctagtcacatagcttcaggctacattatatacaaaataaagacaaatatacccaatactgtcaagggaagcattgtgagccatagagaccaatccaaacttctgatttaggagttgtggctcagctgtgtgattttgagtaattcatttaacttctctgagcctctgttgccaccttcttcaattttctcatcaatttattcagtttatccatttgttcctacacctttctccatgaagtgcattgacacctttgtcaaaatcaatggaccataaatttgaggctctttctagacgtattctatttcatcatctattttatgccattgttgtaatgtcttcattaccatagtttttcagacttgaaatcaaatagtgcaagtcctccaactttattatgttgcaagattttttggacaattttaggtcctttgcatttccatataaattttagaatcagcttgtcaatgtctgaccccaaaatgctatattttgattggacttgtgtttcatccatagatcaatttagggaaaactgatgctgtcaacaatattgagattcccaattcatgaacagcaacattttatagttttcaataaagcaatcctgcccatcttttgttaaatttatccctaagcattttaagttttatgccactgcaaatgatttttaagattttattgaatttgcagccttgctgctcatgcttgcacatttccatgtccacagatttttgtgactgcccaatgggttcaccttgcccactgcctagacagagccgatttatcaagacaggagaattgcaatagagaaagagtaattcacgcagagccagctgtgtggaagaccagagttttattactcaaatcagtctccccgagcattcagggatcagagtttttaaagataatttggcgggtaggagcttaggaagtggagagtgctgattggtcaggttggagatagactcataggggatcaaaatgagtttttcttgccatcttctcttcctgggtgggatggcagagctggaggagccagattacccatcttggtggtgtcagctgatccatccagtgcaagttctgcaaaatatctcaggcactgatcttaggttttacaatagtgatggtatccccaggaacaattcggggaggttcagactcttggagccataggctgcatgacccctaaattgtaatttctaatgcaaaggcagactggttcccaggaaagaaggggtcttttggggaaggggctgttatcaattttgttccagaatcaaaccatgaacagaattccttcccaaagttagttcagcctacacccaggaatgaacagggacagcctaaaggttagaaccaagatggagtcagttaggtctgatttctttcactgtcataatttcctcagttataattttgcaaaggcagtttcatttaccccatctggaatgcccttcttcccacccccacatatcaaaactcacccattctccaaactctgccttctcctttatgagagccaccttcccttccaaaagaaagtaactgctcccatctctaaacttccacagcccacacttccctctaatacctcttactgcctgcctttattatgtgcatgtggtctcgcctccaccagaaataaattctttgagggcaaagtctctaccccatttatcttgtatgtttctcccggaatctagggcatggtggaaatataataaatgttaagtgaaagcaaatttttcacctccttaggtacagtatatgtgcatatctgtcctacctttgggcataattccttatccctgtgttctatcaagccaacagctttcatttcaccacaaaccccacagcctcagagtagagcatcctaaccttgacagcaaatatataactgctcttactagactctataaatcccttctctttgaggttctaaatctttttttggctagagatatttaactaaattgctagtcgttgtggcaacatttgctgaactacatttttgataatttttaatatctcccaatatttattgtgatatctataaatagccgggtccatattttattatggttagaagcacctaccctttgatttattaccttcatgtactagatcatcaaattggctggagttcacggtgttgcaaagtattgtgctgtcctggaactcaggaagggagatgattggtaacagaaaccatcctttaagatgtcattgattaatacacggcatctgtcggccatgtgtgcaatggtcataatgggtgatgggggacggaaacggatcttcaaatctcaatgttttatcctatgagatgggtgctgggatgattgtgtcttcttttaaaatgtgattactttgagaacacagctgaagaaaacacaaagtaattctattctgaaatggagtcttagccaagaaacttgatttggtatcgagagtcattttcccagagactggctcccagatgatcctcctctgttcactggactattatgttttaagggactggctcaggatgtcacagtgtctgtctcccctgcctttgatacctgtggtctggaagggtgactgcatcttccaagcttctgtaatttttagccaggaagattcagggttacagtggcctcatctgtataaacagctgcagtgatagtcacagaacacctgagtgcttttatcagctttgtcactgaccagctgtttcattgtggggaaaacacaagatttttcttaagccaatttctattctagaagaattcccatgctagaaatatctcctagaaaggtataaaggtagttacagtatactattccagccaaatatatttgatcagaagaggttttttaaaattaaatgttgcttgagatatctatttcttgggatattggtttaggaaacactaacctatccagttgccatggcccagcaatagacctgagttatcagctacacatataagtcataatatcgatattcataaaacaaacttaaattatgaagggctcagctattacagcctcaagggcctggttacttatcatttggtctatagagcaaagggaagttctgtgaatgccatcctttccaaatatgttagaaactgaagttactgatatggtttggctgtagtttggctgtgttctcacccaaatctcatcttgacttgtagttcccataatccccacatgtcatgagagggacctagtgggaggtaattgcatcatgggggtgggttttcccatgctgatcttgtgatataagtttcatgagatctgatggttttataaagggtagttctcctgcatactctccctcttgcctgctgccatgtaagatgtggctttgctcctccttcaccttctgccatgattgtgaggcctccccagccatgtggagctatgagtccattaaacttctttttctttataaatgacccagtctcgggtatatttcattagcagcatgagaatggacaaacacagttaccacaagaaagagaaaagcagaagaaaagatagcaggaacttttaaaatcatatttgaaggaatgagagcatgaccactgatgtataagacaataaaacagaagacaggccttgccaggatttagacaagcaaatgtttctccatcctcctcatgcaagctccctaggggacaaaaaccaaagctatacttctttgaagctgcagaatgacacagtggatgagacaagagcattagattcagatgaacccaggggagagatgatctgtgtctcttactgtagctgtgtgatacaggcatgtttgcgtgttagggaagtgtgaaagcaagcctcaaggcaaaagaatcacctagaccaagacctagaggatgtggacaaattagccaagggaggaaaaagtagaagttgcgggcaaaaggcacaacacagttgaagacctgaaagtaagaaagatcatagcatgtttgagacaccgagattagctcagcagggcaggaatgcacagagggaggaaagtgagaacaaaggaagctgggggagagtcagagctaagaaaattgggcttcatcccgttaaaagaaaaacttcaggccaggtgcagtggctcatgcctgtaaccccaacaatttgggaggtcgaggcaggcagattgcttgagctcaggagttcaagaccaccctgggcaacatggtgaaaccccatctctactaaaatacaaaaaattagccaggtgtggtggcaggcacctgtaatcccagatactcgataggctgaggcaggagaattgcttgaaccccagaggcagaggttgcagtgtgccgagatcgtgccactgcgctccaacatgggctacagagtgagactctgtcccaaaaaaggaaaacaaaagaaaaacttcagacaaattaaatttaacagagtttaactgagcaaagatcaattcacgaatcaggcagcctcctgagccagagtaggtccagagaaactccagcctgccttatgagaaaatttatgggcagacaaaagaaagtgacaagtagcatacaaaaaaaaatggaagtgagatacagaaacagctgggtggttacagctcggcattggccttattcaaacccagtttgaacagttggctatccttgatcagccaaaactcaatgattggcataaaagtaggttccagtctgtttacacatctagttaggttatagttcactacataggataaaacattaggccaaatgtaaaataagtaaggaggcagctttaggctaaacttaatttaacagtcctaacagtgacaggtttctaaagtggaaatgacgtcactaggacaggataagagaaagaaatggctcacttgtctacatggaccattagacgcaatgcaaaggagaagaagtcaagaatggtgtccagttttctggattaggcaactgagtgaataaaagcaaaaagctgcaatgtagacaaggtgtctaagaggcaaagttgcaaacaaagtccaatatcactatctgcttccaaaggaacagctgctggtggctgtagtagcagaaagaatttcagataaacaaatcatctttttcagccgcatgtaaacaaccatagctcagcaataaccttaaataagaaaagaaatgcttgccacaatactgtattgagtggcattcaaattaaatacttcagataatggggtcaggttggatccttctaagagactccagcccaggcccagacatctagaaaatatttgaagcattaccgaatattttagaagccaaatgtctgctttgccttcttagcacaaaagagtctaagagcctggaaaagttcagcttcaccagctagtgttgctatacccaaagggtggaagtcactgaaggtcaaagaaaaattgtaggcaccaactgttaggtttagtaatagttcaattaaggatgctgggaactttaaaatagaacattgtgttggcatcagtggtgactacaatttctacagggtgttgctttcaatgagatttagggtctcttaaagactttgttaactttttttttaatgtggccatttaaacagttttaaggttaggggcttagaaacccttccttcttcctttgcagaaattccaggtgtgtatttcaagaggtaagtacctttgaaaaatgagaatgaatgtaaagccggctcacttcccatcacttacattgcataaatgttttgggatgagatcaaataaagcttgatatatgtggttcaggcaatatgcagagccccaaaacaatttctgaaatatatggcttctctcttgtcctttgcccataatcctactgttatgtttcagcttttgatgttcctgaggcttagttatatttctttctttatctcactaacggacctaaggtgccaccggatttttacaatgtggattccttttatcactaactcttatcacgaagccacattcaggcatcactcatgtcctggttctgcatgctttcctcctcttcacagctgccatccacagtgcctccagctactgtcacatcaaattacactagctaaatagaatgaagaagagtcagtcccgagtcagaacaacttcggtaaagatgcttggctgtatttagtggacatttattaggtatcaagtcacactgaaggaaacattcatttatatcatgtttagcaaatcattgaaaaacagacatatatatttcattgatttttggaagaattaaacatgacagcttgatggaaatgcaatatttaaaaacaataatatctggagcttcatacagtgacttttatccagtgagtttgtaggtttccttccctcaccacacattcccacgtgcaagttgtatctactgtctccaatcatcagactcatgataaagagaatctaattgtaggatatgaagatatgtagctgtttccagtgcctccacagtaacctcaatgaaacaatcaaccgtttagtaattcttgttccctgaaaaacatgaagctggcaataaatctacaggcagaggccagctctacattagcaaaatgaagcagagaattaaagtaattatctaaaaaattcatcatgagcctggggtaggtagctaaattacttaaatgaatatttcagggggaaaatgcagttttggaaaaaggcctttgaagactctcttggctcactgattgcatgtaaaacaggaaagtcattgtaccaatgacgtccacgtatagatggaaggtatcccctactggagccttactttgagagtgcaaaactgttcaaaaatgttactgtggtttaaaatttttgccacttggctttaaaatcaaaagagattgaggaggaccaaacaatgattcgtccattggggatttagtcctatcgaccattgtttcctgggttccacagagtgaaggctcaaagaaacttctaggagacattcctttccctgcgttcacctcaagatcagccaagatcaacacttaccccaattggcagagacagagggaattttaagactttcccaaagtaggcaattttttcccttccttcagtgcaaaataagccttagaaaggtttgtattgatctaagtctggtcactttgttcttatatgcctgtcttataggagcatcggtgtcatgccctctgaactggtcacaaggattcagggcagagatacaggctctctttccaagcaggggacttcagatccttggaactaaaagtgtggaccatgaaccagcagcatcagcatcatctgggagcatgttggaaatgcagagtgtcaggccccaccagtccgctgcatcagactctgaaaaatctccccagggaatgaacatttgtgaagcgcctatctccatgacattgtggatctaggagagcaaggggtaaaatctgagcaaacctgtaaggtaggagagaagaatcaattctataggttcacagagggctgaagagtccagagatgtgagatctgagaataagcagaatcaatacaaacagaccagtctatgagattacaatcccagggacttgggcttgctgtttgatgcttccagctgagtgtctacaccttgggatcgcaggtgttaattacggccacaaagggcccggagacctaactgcgaatccatcactttaagaggaatacctgcatccctgttaatggtttcccaagacacacatcccttcccccaaaggcagacgcttcatatggaggacagcaagtcccatgacattcactaggagctgggggagctgggcaggagcaagtgaagtgttagatggaaagccccacttttaaaaatgtcctcaatctcagctgagcatgatggaaacatgctgtttccacagtacatattgtgttggcttttattagaatgtgttgttgctgccattaatttaattattttatggattgattttgcagagcttgcatcctgaggctatacatatttttttaaagcagagaactcacttgagaatgaatgtacatattgcacatgtggctgaaactcatttgctcagaaaagatgggaagcagctggctggcttcttgcacatatacttaaggagcatgcctaagtcacatgaatgtcctcattaccaaactgaagaactccaggaccatctttctttcttagtcacatcaataatgaccatttatagagtgtgcgcccatctgaagcaccatgctaagtgctttgcatacattacatcttaattccgtaagacactcaagttcccactgggttctagtctcagcttcaaatggtccaccatttaccttctctatatctcaatttacccacccttaaaaaggtggcaactaccttctcaagctgcatacaagagttgtcttgagcaggggtccccatgctccaggacagggacccataccagtccatggcctgttagggaaccgggctgcacagtacgaggtaagtgacaggctagcgagtattcccgcctgagctccacctcctgtcagagcagcagcagcattagatactcataggagcacaaactgtattgtgaactgtgcatgcaagagatctaggttgcgcgctccttatgagaatctaatccctaattatcagaggtggaatacattcatcccaaaaccatttcccctccccatgccccagtcgatggaaaaattgtgtttcacaaaaccagtctctggtgccaaaaaggctggggacagctggtcgtgaggatcaaacaagagtgcccaggtaggagcagtctgtgatataagggcttaatattcctgcggagcttttgttttcatctggaacttcttcttcatgcactccataaaaatttatgtgtaggaacaagaagcagtgctgttacctgtgctgcaaagcagggggtctgcttcagagaacttcctgctgctgcgctggccgactgcactaatgcacatcccgctgagcgactgctatcaataactacttcttcctgacttctcccctactagtttgcactgagccagccctcccatgttgggcgacttgggctctggcttttcctccctaaacgaattacactttcttgctccttattaatcttgtcatactttatatttaattccaattctgtccttcacactattgcccacacacacccaaattggagctgtcagcaagttatccctagagccttactgggtcacatcacccaaatgccctcaggtacttcctttacttacaaacagcaagggagtttaatttatttgaacattgagcgtttggtgaagcctgactgcactttaatgtatctaatcaacacttcaaatgctctacgatgaaatccccgataccagataaccagtctggtggcttaaatgtcagtttcaatataatgttcattaaatagcatgtcctcttcattagaccctatgccaggtgttttacctatatatagatatttaaaccttattttagctttgtgagataaatattaatatcccagttgtaaagttaaggaaacagaggctcaggaaggctaaatcacttgcccagagtcgtagagctacttggaaaaactgaagttccaatccaggactcccaattccaagtccaaatgcctttccaccatgccacagttcccattgagagcaatgtggaagacacatttgcagaactcttcagggcaagtgttatcattattacatcctggagcttggtaaagttgtcttgagatgcttcaaaaggaatgtcacttgcttggtctagctgaatacagaatctattttcctatcactaattacttcatattggtgtaaaacacatgaagtcctgactgcaaagccttatagtgctcattgaaaatgactaagtgttattttaagtttggcaggaactagcacattttcacagcctgaaagaattttttggccaacaggttttgttcagatccacagttgttaaccattacagatgcctaaaaaaaactaagattggggttgttgaaatatttaactgatgtctggggtcaatagaaactgagaatcttcagtttctacactgtcactagtgctccaaagtgaaggagaagttcattttccttcacctttcaaaaaagatatttctggatatgaattaaacctttgtgatctaaagatgagttacgtgtgctataccattcttcaggtttacactcttcatcctgttgaaggatttatcatttctgagaaacccaagttagttgtatcatttaaaaatgtaactcaactactgccaacaaaaccaagaaataatgttgactttttaaattttttttacataaaaaaaatctggaggcaagcaatttagggcatgggtggcagctcaaccatcacatcaacaacctaggtaactttgatctttctaccaacttttgtatatgacttccattgttaatatgattttgaggttcatgatggctgctggggcttcaaccagtattttcacatttcatgtgggacagagaagaaagagttccagcttcaggaggaaccaagaataaatctttgttaccaggcagtaaaagctgagattcttactcaggaagaaagagtagatggattttaaacagttgactaagagtctcagtgagttgccaagggatgaaaaattccaagtccatttggaaccttcttaggttggattacaggcatgattcataagctcttagagctaaaaaacatgagagatcaactagtccaacatctgcattttaaagttgaagaaactgagggccaggaaaaccactggactcggttaagacagcaaagccagtgagcatcagaggttggactgggaatgaggtcgcagtcattccaacctaacatggttttgaccatagcacatttccttactaagcttgctttataactgtgacacatccttttgttgaagttttagagtatctatgcataacatttctctcttcccttcctgttgagaaataagagaagtcaaacagattctgatcaaatactggctttattattggtgcaggcaattgaacagtgttgttatccagcagtaaccaaaaaggcttccctttgcccttcaatcaggccaatgtacccacccactcatgggcagcactaccacaggcctcttccacaagacagcttctgtggggtggagacaggagtaggatacagaagggcacaccagaattcatgcccctgcagtaagacttgctcagaaaggaatggactggcctgagcatgtcctgtcccttctcccagtgacagcaatctcttctctgccctgcagagtacatggggcagcaaggagaggccagaagtggttctctaatgagttcttccaaatgaaatttcctctacatagggccagagaaaaaccacatcccccttaacacttaaaatatgtttatcttatctatcatatttcctaccataatatttgacacagatacttgaacatggcttcattgacttactatgagatttattataagggtggggtagaccagagtctggaaagtaaagcacagaaaggttatgtagcttattcaaagtcatacagtaagtgggaacaaaaccaaaaccaggacccaagtatctggccccacttccctggatactttctctaaacttggctgtatatctgcaagtcctcctgttctgacaaagcaatcataccctaactaactggagaccatctggagcattcagaatagctccaggtacttttgccagattaagactagtgtccctcacagtgagaaaaagtctttgagggtaaagaatactcaagccttatgaaacttgctggtgggctagaggaataactcaatcaatcaagaaacttttaaaaaagagatagaagactcaaaatcagagatgaaaagggaaccattgcaactggtaccataggaatacaaaggatctatcataagaaacaattatgaacaattatatgtcaacaaattggaaaagctggaagaaatggataaattcctggacatatgcaactacaaagactgaattatgaagaaatagaaaatccaaccaaagaaaaagatcgaatgagtaattaaagatatcctatcaaagaaaagcccaggacctaatgacttcactactgaaaattctaggcaacacttaaagaaaaactaataccaatttttatcgactattctcaaaaaattaaagacaaaagaattcttccaaactaattcaacaaggagaggattaccctgatatcaaaaccagacaaggacacaacaaccaaaaagaaaattttaggccaatatctctgatgaacataaatgcaaaaatcctcaacaaaatactagcaaagcaaattcaatagcatatttttaaaaaatcattcaccatgattaaatgggattcatcccaggaatgcaaggatggttcaacatatggaaatcaataaatatgatacaccacattaacagaatgaaaggcaaaaatcacataattatttcaatagatgcaagaagaggatttgagaaaattcaacttcacttcatgctaaatattctcaaagaagaaacatacttcaacacaataaaggcaatgtatggcaaacccacagctaacatgatattgaacagggaaaagttgaaagcttttctcctaaggtctggaacaagatgaagctgcccacttttaccacttctactcaatataatactggaagttctagccagaacaagagaaagaaatcaaaggcattcaaattggaaagaaggaagttaaattgtccctgttcacagaaaatacgatcccattaacagaaaactctaaagattccatcaaaaaaactatttgaactaataaattcagtaaagttacaagatgtaaaatgaacatacaaaaatctggcaaggcatggtggctcacacctgtaataccagcactttaggaggctgaggcaggcagatcagttgaggctaggagtatgagaacagcctgggtaacatgatgaaaccccatctctacaaaacatacaaaaattagccaggtgctgtggcacacaccatagtcccatctactggggagaatgaggcaagagaatcacctgggcccagggaggcagaggttgcagtgagctgagatcatgccactgcactccagtctgggtgacagaagtgaaatcttgtctcaaaaaaaaaaaaaaaaaatcagtagcatttctatatattaatagcaaactatctgaaaaagaaatcaagaaaaaataccatttacagtagccaccaaaaaaaccagcctaggaataaatttaaccaagaaggtaaaatatctctacaatgaaaactataaaacattaatgaaaaattgaagaagaccaaaataaatggaaaaatatcccataatgacagtttgaaagaattaatattcttaaaatgtttatacttcccaaagagatctacagatttaatccaatctttaccaaaatagcaatggcattcttcacagacatttttttttttttacatatagaaatcaaggtatttatttatttatttatttatttttttttttaattttttttttaaattatactttaagttttagggtacatgtgcacattgtgcaggttagttacatatgtatacatgtgccatgctggtgcgctgcacccactaacgtgtcatctagcattaggtatatctcccaatgctatccctcccccctcccccgaccccaccacagtccccagagtgtgatattccccttccagtgtccatgtgatctcattgttcaattcccacctatgagtgagaatatgaggtgtttggttttttgttcttgcgatagtttactgagaatgatggtttccaatttcatccatgtccctacaaaggacatgaactcatcattttttatggctgcatagtattccatggtgtatatgtgccacattttcttaatccagtctatcattgttggacttttgggttggttccaagtctttgctatcgtgaataatgccgcaataaacatacgtgtgcatgtgtctttatagcagcatgatttatagtcatttgggtatatacccagtaatgggatggctgggtcaaatggtatttctagttctagatccctgaggaatcgccacactgacttccacaatggttgaactagtttacagtcccaccaacagtgtaaaagtgttcctatttctccacatcctctccagcacctgttgtttcctgactttttaatgattgccattctaactggtgtgagatgatatctcatagtggttttgatttgcatttctctgatggccagtgatgatgagcattttttcatgtgttttttggctgcataaatgtcttcttttgagaagtgtctgttcatgtccttcgcccactttttgatggggttgtttgtttttttcttgtaagtttgtttgagttcattgtagattctggatattagctctttgtcagatgagtaggttgcaaaattttctcccatgttgtaggttgcctgttcactctgatggtagtttcttttgctgtgcagaagttctttagtttaattagatcccatttgtcaattttggcttttgttgccattgcttttggcgttttggacatgaagtccttgcccacgcctatgtcctgaatggtaatgcctaggttttcttctagggtttttatggttttaggtctaacgtttaaatctttaatccatcttgaattgatttttgtataaggtgtaaggaagggatccagtttcagctttctacatatggctagccagttttcccagcaccatttattaaatagggagtcctttccccattgcttgtttttctcaggtttgtcaaagatcagatagttgtagatatgtggcattatttctgagggctctgttctgttccattgatctatatctctgttttggtaccagtaccatgctgttttggttactgtagccttgtagtatagtttgaagtcaggtagtgtgatgcctccagctttgttcttttggcttaggattgacttggcgatgcgggctcttttttggttccatatgaactttaaagtagttttttccaattctgtgaagaaagtcattggtagcttgatggggatggcattgaatctgtaaattaccttgggcagtatggccattttcacgatattgattcttcctacccatgagcatggaatgttcttccatttgtttgcatcctcttttatttccttgagcagtggtttgtagttctccttgaagaggtccttcacatcccttgtaagttggattcctaggtattttattctctttgaagcaattgtgaatgggacttcactcgtgatttggctctctgtttgtctgttgttggtgtataagaatgcttgtgatttttgtacattgattttgtatcctgagactttgctgaagttgcttatcagcttaaggagattttgggctgagatgatggggttttctagataaacaatcatgtcgtctgcaaacagggacaatttgacttcctcttttcctaattgaataccctttatttccttctcctgcctgattgccctggccagaacttccaacactatgttgaataggagcggtgagggcatccctgtcttctgccagttttcaaagggaatgcttccagtttttgcccattcagtatgatattggctgtgggtttgtcatagatagctcttattattttgaaatacgtcccatcaatacctaatttattgagagtttttagcatgaagggttgttgaattttgtcaaaggctttttctgcatctattgagataatcatgtggtttttgtctttggctctgtttatatgctggattacatttattgatttgcgtatattgaaccagccttgcatcccagggatgaagcccacttgatcatggtggataagctttttgatgtgctgctggattcggtttgccagtattttattgaggatttttgcatcaatgttcatcaaggatattggtctaaaattctcttttttggttgtgtctctgcccggctttggtatcagaatgatgctggcctcataaaatgagttagggaggattccctctttttctattgattggaatagtttcagaaggaatggtaccagttcctccttgtacctctggtagaattcggctgtgaatccatctggtcctggactctttttggttggtaaactattgattattgccacaatttcagagcctgttattggtctattcagagattcaacttcttcctggtttagtcttgggagagtgtatgtgtcgaggaatgtatccatttcttctagattttctagtttatttgcatagaggtgtttgtagtattctctgatggtagtttgtatttctgtgggatcggtggtgatatcccctttaccattttttattgtgtctatttgattcttctctctttttttctttattagtcttgctagcggtctatcaattttgttgatcctttccaaaaaccagctcctggattcattgattttttgaagtgttttttgtgtctctattttcttcagttctgctctgattttagttatttcttgccttctgctagcttttgaatgtgtttgctcttgcttttctagttcttttaattgtgatgttagggtgtcaattttggatctttcctgctttctcttgtaggcatttagtgctataaatttccctctacacactgctttgaatgcgtcccagagattctggtatgtggtgtctttgttctcgttggtttcaaagaacatctttatttctgccttcatttcgttatgtacccagtagtcattcaggagcagattgttcagtttccatgtagttgagcggctttgagtgagattcttaatcctgagttctagtttgattgcactgtggtctgagagatagtttgttataatttctgttcttttacatttgctgaggagagctttacttccaactatgtggtcaattttggaataggtgtggtgtggtgctgaaaaaaatgtatattctgttgatttggggtggagagttctgtagatgtctattaagtccgcttggtgcagagctgagttcaattcctgggtatccttgttgactttctgtctcgttgatctgtctaatgttgacagtgggatgttaaagactcccattattaatgtgtgggagtctaagtctctttgtaggtcactcaggacttgctttatgaatcggggtgctcctgtattgggtgcataaatatttaggatagttagctcctcttgttgaattgatccctttaccatgacgtaatggccttctttgtctcttttgatctttgttggtttaaagtctgttttatcagagactaggattgcaacccctgccttttttttttttccatttgcttggtagatcttcctccatccttttatttcgagcctatgtgtgtctctgcacgtgagatgggtttcctgaatacagcacactgatgggtcttgactctttatccaacttgccagtctgtgtcttttaattgcagaatttagtccatttatatttaaagttaatattgttatgtgtgaatttgatcctgtcattatgatgttagctggtggttttgctcgttagttgatgcagtttcttcctagtctcgatggtctttacattttggcatgattttgcagcggctggtaccggttgttcctttccatgtttagcacttccttcaggagctcttttagggcaggcctggtggtgacaaaatctctcagcatttgcttgtctataaagtattttatttctccttcacttatgaagcttagtttggctggatatgaaattctggtttgaaaattcttttctttaagaatgttgaatattggcccccactctcttctggcttgtagggtttctgccgagagatccgctgttagtctgatgggctttcctttgagggtaacctgacctttctctctggctgcccttaacattttttccttcatttcaactttggtgaatctgacaattatgtgtcttggagttgctcttctcgaggagtatctttgtggcgttctctgtatttcctgaatctgaacgttggcctgccttgctagattggggaagttctcctggataatatcctgcagagtgttttccaacttggttccattctccacatcactttcaggtacaccaatcagacgtagatttggtcttttcacatagtcccatatttcttggaggcttttctcatttctttttattcttttttctctaaacttcccttctcgcttcatttcattcatttcatcttccattgctgataccctttcttccagttgatcgcatcggctcctgaggcttctgcattcttcacgtagttctcgagccttggttttcagctccatcagctcctttaagcacttctctgtattggttattctagttatacattcttctaaatttttttcaaagttttcaacttctttgcctttggtttgaatgtcctcccatagctcacagtaatttgatcgtctgaagccttcttctctcagctcgtcaaaatcattctccatccagctttgttccgttgctggtgaggaactgcgttcctttggaggaggagaggcgctctgcgttttagagtttccagtttttctgttctgttttttccccatctttgtggttttatctacttttggtctttgatgatggtgatgtacagatgggttttcggtgtagatgtcctttctggttgttagttttccttctaacagacaggaccctcagctgcaggtctgttggaataccctgccgtgtgaggtgtcagtgtgcccctgctggggggtgcctcccagttaggctgctcgggggtcaggggtcagggacccacttgaggaggcagtctgcccgttctcaggtctccagctgcatgctgggagaaccactgctctcttcaaagctgtcagacagggacacttaagtctgcagaggttactgctgtctttttgtttgtctgtgccctgcccccagaggtggagcctacagaggcaggcaggcctccttgagctatggtgggctccacccagttcgagcttcccggctgctttatttacctaagcaagcctgggcaatggcgggcgcccctcccccagcctcgttgccgccttgcagtttgatctcagactgctgtgccagcaatcagcgagattccgtgggcataggaccctctgagccaggtgtgggatatagtctcctggtgcgccgttttttaagccggtctgaaaagcgcaatattcgggtgggagtgacccgattttccaggtgcatccgtcacccctttctttgactcggaaagggaactccctgaccccttgcgcttcccaggtgagggaatgcctcgccctgcttcggctcgcgcacggtgcgcgcacacactggcctgcgcccactgtctggcactccctagtgagatgaacccggtacctcagatggaaatgcagaaatcacccgtcttctgcgtcgctcacgctgggagctgtagaccggagctgttcctattcggccatcttggctcctccccacagacattttttatttcaaaaacattagtagacatttttctatgttgaaaaaccatctgaaatttgtatagaacaataaaagactctgaatagtcaaagcaatcttgatcaaaaagaacaaagctagaggcattatacaactgacttcacaatacagtaaccaaaacagcatggtattggaataaaaacagccatataggctaatgaaacagaatacaaagcctagaaataaatctatgaatttacagtcaactgattttcaacatatgtatcaaaaacacatcttgagaaaaggacagtttcttcaataaatggggtcaggaaaactggatatccatgcacataaaaatgaaattagacccttatctctcaccacatacaaaaatcaactcaaaattgacagagacttaaatgtaagaccaaaactgtgaaacaattagaagaaaacatagggaaagtgcttcatgacattggtgtaggcaaggattttatggaaagccctgtaaagtatagacaacaaaagcggtgatagacaaatagaattacatcgaactaaaaagcatctgcacatcacaggaaacaatcaacagagtgaagagacaacccacagaatgggagaaaatatttgcaaactacacatccaacaaggggttaatatccaaaacagggaaataattcaaataactcaaaaaaaaaaaaaaaagaaatgggcaaaagatctgcatggacatttctctgaagaagacatacaaatgggcaacaggtatacaaaataatactcaacatcactaatcatcagggaaatgcaaatcaaaaccacaataaaatatctcaccacagttagaaggatataatcaaaaagacaaaagacaatgtgttggcaaaaatgtggggaaaagcagatccttttatactgttgttgggaatgttaattagtacaaccactatggaaaaaagtatggagtttcccaaaaaaaaattttaaaagaactaccatatgatctaagcaatcccactactgggtatatatccaaaggaaatgaaaccaatatgttgaagagacattttcactcccatatgtttttgtagcactattcacaatagtcaagatacggaaccaacctaagtgtccatcagtggatgaatggataaagaaaatgtgatctatatctacatatatatatatatgaatatatagatacataatggaatactattcacccataaaaaagaataaaatcctgccatttgcagtaacagggatgaatctggtgaatataattaagtaaaataagtcagacatagaaagacaaatactacatgttctcactcgtatgcagaatctaaacgagttgatacgatggtgggtatggggtggttagggggaggtggagatggggagatgttggtcaaaggatacataattatagtctggagtacatttcaagagatctgttgaacagcaggatgactatagttaatgttatgtaatagtcaatgttatgtgctatcaccacaaaaataactatagaagtaatgcatttgttaattcactagcgttaacagtgtatatatatatttcaaaaatcatgttgtacaagataaaagcataatgttatctgtcaaatgaatgtacaaacatttttaagcaccttctgggtgccaggctattactgggataaagaactgacaacataccagttgaaatctgtcataacctagtagggaaaacaaccaagaagacacaagcaggcttacagtgatatgtgtgttcacaggatgctaagtggggaagggatgtcattccaaatggaaagcatgaagagacggaagagtttgtcttcttctaataacttcaggtcacttagaatacctggatcacaaggagcaagtcaatgttgtgtgaggaacagaaggaaaacaacttccctagaaacagcacaggctgatgttgcacctacattaggccaaccatgaaacatgaaagcccctgcaaagttataaggtcagtgtttcccaaggatacctgccacttggataagaataaatctagaagccattgatttgaaaattattctttatgagtcttctttctactgtcccaatttttctgctaagcattactcccaccatcaacacagacacattaaacgacttgttccctaccatatcatttcctttaatgtggacatatacatgcacttaggaatgcagtttctgtacttccttcagaaggactcttctatttgagcttttagcatctttacttaaagtgtgttcatagctctcctttctgaagttggccagttgaagtctgaaggaaattttaacagatttggcacatttgagagcctgcaactgaacaggttgaatcggaatcagtgttgctttactcttagtctctgtttcaggtttaaagtcttcaaaatggctttctacatttagtttttcaagattttctaagtcacttaggctttttcaaaagctatattgtctagaacctcacagaagcaacagatatctatcctgctgcacctactcaagactctccttggaaactcttgaaacagctttgctgacccaccaccacttcctggtggacacggtaaaaaccactggtctctgtgctggtttgagagcccttgcagttttaacaaatagacagagcccagctacttaataatcttctcggcacctcactcccagctgaatctgtggatgtgcaagacaaatgcccagacaccccaactccctcttcaactccccagatttctttggtcaaagcatcagctctgggccccagcagtgctgttgagaattcagttccaatcccatcagagtagatggaattacaagatagattccacttgcctgagactcccaagcccaagtcaaaggaacacatttttaaaatagcaaatgtaacacatctcctgtaactaactgttccttgtataatgtggatccaagattgctcaccaacttgagcattttctcctgggcatattccagagtgtcagagtctctgctaagaaaaacaaaaatttgagaatgcaatttaattctctattactggagggcagaattttaagggcgtttcttttctttctttttttaatggaagaggcatgggagaaaacacgtttagctatgtgctggacatttcatataacatcttttaattgtcatgtaacaactaagaagacaaggttaggctgtccataacagagaaagtctttctgtgttgatttatctctcttgtaaaaagggcaagcaatgagaaaacagaaaaacagtattcaggcccgggctgtttcttggattccttagagatcaagcccctttcagctcactattctgccatctttatcagatggcccttgccctcataatctgaagaagcattttccttccaggtggcaattttgagaaagacaagaaaaaagagaggaagaaagagaagttgccagctgtctctcaaggaaggttctcagtcgctgtcacacaactcttctctcatatcctattgttcagaactttgtcacagtatcacacctaactgcaaagagcccaggaaatgtattcttttgttttatggtcatcagctcaactaaactttatcttactctggaggaaggggagaaaaggtatttagagacaatcagcagggtcagtcacaagttacaactccatgaagcaggcattaataaactcatcaaacaaatgaagaaaccaagtccgaaatgtttcagtaagttgctgtaggtcatacagctagaatgtgctatagccactacctaaattgaaatctttttataccaacaactgttttatttcctctattgtccatactaagagtaagaagtacccttctataaatacattctgttcgttgtattatatccttggctttcatatggtgaactaaagtatgtcacctttctctcatgattctctttatactaccactaggctggtacaaactacatcatctaattattgtcattgcctatcaattagattccctattctcatcttgtcctactccagttcatcctccacacagcagaaagagtgggcttttaaaaactcaagtctaaaaattttacttcattgcttaaacacccataataactgcacatgactgtttagataaagatcaatcaacaccattaatgcagctttcagggcttgcaagtcgggccctacccacctcatcggtttcctgtcgtatgattcttctcctccttctccacactactctggatttctgtagacactccgtggttccttctatcttggggcctctctgatgctgttccctctgtcctgagtctcttttcctgatatctttgtgtccttcacatttcagattttgactcaagaaagacctctttgacacctcagactatatcaagtccttctagtatatgctttcaaagcaccttatttttctggattctgaacacaatttataactatacatatattttaatataatgtatttctatttcttctgctaatctgtaagcttcctgaagaaagtaccattttcctcacaatggcatctccaacatctggcaaatagatgtttgctgaaggaaaaagaaaacagttcaatttataacccttctaattttgcttgtttgttttttgtttgttagagatggagtctcgctctgtcactcattctggagtgaagtggcacagtctctgctcactgcaacctctacctcccgggttcaagcgattcttctgcctcagcctccagagtagctgggactacaggtgcatgtcaccacgcccagctaatttttgtatttttagtagagacagtgtttcaccatgttggccaggatggtctctatctcttgacctcgtggtccacctgccttggcctcccaaagtgctgggattacaggtgtgagccactgtgctcggccctaatttttatagttaattaattgtgactgaaatgaggaatactgcatgtatccattcatctgttcaaaatatttattgagcatctactgtgctctaagcgctagaaataaaactgtgaacaagacagactatgtccctgcattcaccgagattacattcttaaggaaaaaaattgatagatgactggatggatgggaaaaagggataaagaaaagaagaaagagaaggagaaaaagaaaacatgagattttgtcaagtgctaggaagaaaagtaaagcagaataaggcagaagactgttggagtgggacaagacatacttaggcaggatagccagggaaggctttgctaaggaggtgatatttgaatgtaactaaattatattaaagggaaaccatgtaaacatatggaataagagcattcaggtaaatggagcaaggaaaaaggctttgagatggaaacagccaaagcactgtggctggaacagagagaaatcaatactgaggtagagcacttcaatctgatgagataaatgtaacatattgattcctcaagagtagaaactaactttcagctttaagttctctataaatatggtaaacatgccatgtacaatgatagaccatggtgatccatcattttagtctacctcctaggtcactctcgatttgaacaatagtttgtgttcaaataagtaactttttctaccaaatgtgtgagcaaagaaataacagcaacttctttactatctattccaggaaaaaaaaaaggatagaacacttcctaaatcattttataaagctaacattacattgataccaaaaccggaaaaaaaaagttttcaaaggaaaattatagattctctctcatgaatataagtgcaaaaagtctttttaaaatatgagcaaatagcattcagcaatatttaagaattatacaccatgttcaagtgggatttacccaagcatggctcaacatgtaagaatctatgtaattcatgatattaacaggctaaagaagaaaaatataatcatatcaataggtgtggaagaaacaatggacacaattcaacatccattcataatttaaaacacttagaaaaatgagagcaaaggaaaaggtgttcaacttgataaggagcgtctacaaaaaacctaaagctaatatacttaatggagaaaaactgaatgctttcactgtaaaataaaaaacaaggcaagggtgtccgctcttattcaacacagtgatgaaagttctagccaaagcaagaaagcaagaaatggaaacaaaatgcaaacagattgaaaagaattattttagatcatctgtactagcaaatgacatgattgggtacacagacaatcccaaggaatctacaaaaacacatatgactaataagctcagaaagttcttaggatacaaaataaacatacagaaatcatttgtatttctacgtactaataatgagcaccctatgttcatggactggaagactcaacatagcaaagatgtcaattctcccaaaaattcatatataagttatatgcaattcctagtaagatcccagcaagattttttgtatatatagacaagattattctaaaatatatatggaaaagcagaggaactagaagagctaaaacaattttgaaaaaaaaaaacagtcaagtgagagagagatcagtttattcaatttcaagggttattatatagctgcagtaattaagattatatttggtattagtggaaggatggacacaaaaatggatccgaataaagaacccagaaatagactcacatgaatatgcccaactgatatttgacaaaagagcaaaagcaatgcaatagaggaaatattgccttttcaacaaacggagcgaagggacaacaatgaaccttgacctaagtctcacaccttatataaaaatcaactcaaaacaaatcaccaacttaaacgtaaaaaagaaaagatgaaatataaaacatttagaaaaatatatgagaaaatctttgagatctaaggctagacagaattcttaggcttgatatgaaaagcacaatccacaaaattaaaaatggacaaattagatatcaaaattttaaactttttgttctttgaaatatctgttaagaagattaaaagataagctataaactggaagacgatatttgcaaactacatctccaacaaaggactagtaattaatatacatatatataaaatatatatttaaacactcaaaataattaaaaaacaatctaattagacagtgaacaaatgacatgcatagacatttcacaaaagaagataaacaatggcaaatgagctcatgaaaccatattcaatatcattagtccacaggcaaatgcaaatttaaactacaataacttagatatcactacatgtctaccaaaatggctaaaattttaaaaagtagtgacaccaccaaatactaatgatgatgcaaagaaattaagtcattcatacattgctggtgggaatgtaaaatggaaaacatctggaaaatcatttggcagtgtcttaaaaattaaatatgcaactattatatgactaacaattatactcttgggaatgtatccaagagaaatgaaaaatttttgtttgcacaaaaaaactatgcctaagtattacagcagccttatatataacagctaaaacttgaaagaaatccagatgtcctccagtgggtgaataaactgtggtagatgacatcatggaatactattcagtaataaaaagaaatgaactggctgagcccagcggttcacacctgtaatcccatcactttgggagtccaaggcaggaggattgcttgagcccaggagtttgaggctgcaatgggccatctcaccactgcactccagcctgggtgacagagcaagactcagcctttaaaaaaaaaaagacaaagaaatgaactattgatacatgcaacaatttggatgatccttcggagaattatgcttagagaaaaaggccaatctcaatgtttactaactgtacaattccatttatatatcagcattgaaattacaaaactagagaaatggagaagagatgaatggttaaggatgaagggaggccaggagagaattggagtggccatggagggtccacatgagggatgcttatggtgatgaaaatgttctgtattgtattttattatagttttgcaagatgttctcattggaggaaactgaatggtacatacaatctctctgtattgtttcttacaaatgaatgtaaatataaaattacatcaaaatgaaaagcttaattcaaaaaattttaaaatcaaagtttatgctcaaatcaatggctatttttctggattgcaggtttatccattacaatatgtttagcaatccttcctcattccaacatcttcaaatattcatctatattctcttccttttgattatttaaatttttgcattttattcttacttttactttagtacatgataattttaaaggctctagcttgatttttttcaaacggaaaatagtttccaaaactaattttttgttgattcatccattttccactggtttattatattttctttatcatatgctaacttctgaaatacaccaagaacaattttcttaatcactcttactgtttattttgctaaatgcactccgaatctctttgtcaagttcaaaaaaaattttacggtctaatttataatccattaaatgtataattaattatggaaggattaacatatttacaatatttaatctttccattcaagaatagggttctccatttattcctattcttttgtatctctcagcaaagttttataattttcttcatataggtccatttatttcttgctagaaatattcctaagttttattgatcttgtagctgtagtctttgtttccatgcaaaggagatagatgtccagtttcctagttttaatacattctgtatttcttaaacaagggctaaacagtgggggaggaagtaaggggtctctctacctacatgtaagcaatcatttttagagtactgattgtcattttcgtcaactttgaacttagtagaaactcctccctgatactagcactaatgtggtcagtcctacttttggttttcttctttcctatgtctccataggaactctagtaagaatttgtgagaggcaacatgggcactgaccaaatgtcattgtgaattgaattttttattctcccattctaagcacaaagttttcaaacaggtcccagccacccaagagtacttttatactatgtgtatttttgctatatcattcatagtgatattttggcatgtcagatattgccaagtgtttttgtaaacccaagaaacagtagatctatgtcactcccagtgatctatcaattcagtaaaatgctttcacaaaaggaggtcaggttagtttgtcatgatttgtccttagtcactccgtgtcttctagcagtcaacacattcctttcaaagtactcataagacatctgctaaaaattcattctataatttgaccaaactttgaacaatttattagtctgtagtttctggagtccaccctttttcaaaacttgtgacatttacttgccatcaatcttctggttcctctcttgttgtacataatttttttaagattaccagtggtgactctgattacacatctaaattccttcagcacccggggatgaaacttggctgcaccaaaagacatgacctcatgacaggaattaagtcttgctctccttttccagtcatcctgggctagaatttctttactatatagattattctactttgctagaatctgaaactcttgagagaaccaacaattgtgggtggtgttgtccttacaggggaaattgtttcaaagtggcacagaaggcaaatcacttcctgatgtatgatcagcagtgatgcctagatacatggtggcatgggtgtgtgcgtgtgtgtgcaatctggatgcttttcctggtttctccattttagactgttacctgcttgttttctcgtgttgaacatccccttgcaccatgcttattttaaatagcacacccatttggaatctccagttcatactgctgaacacctatcttgtccctaatggttggattggaataacgttaagaccttaagacgcacagccctgccctgttgtttctggatgaatggtcccaccaccagttcttgagtctctgcagctccaccttccagcctagtctgcccttactccccgtatcggttccactgtacttgtctctgtaactgtgtctcaggagttcaccccaggctccactggtatcactatgaaccagcatgcactgcagtacagactgactccggggccacagcacctgctctctggggatatactgagtcccaagacccaggtgcttaaaccataccccaccccatgccacctcctccttgatcaattagttcctaccagaagacccggtatggcttctctgtaccttgccatgtgtagataattaataaatgtttattgaaatgaattaagtaacaattgcgtatccacattcactttgaagaaggcttggtaagttttgtaagggtctatttgtataaagttttacacccttccaaagccaatttcattcttgctaaagcctgggggatccttaacagctccattcctgatctgtgctgagacagaactctttcttctgctgcctccacacaactgcacaaaacccttaaactgaacgcaattcagacctggaacattctcgcatcttctgaatcccttggctcagagtatattatcctagtgctcaggtcctatctgcctcctaggacataattcactcatagaacccacaccgcagctcaggcaggagacctccaataccatacaggatatttatttacctgccatgaatctcaaaggatgacaagaagtaaatcagcttctagaatatgtgtgaaaacagcagctgagacattcttgtccaactctgcaagactgttaagttctaatgcacaggatacaccattcattctaacatatacacctccatggggaccagaatacccagcaattgataaacacttccatccattcccccatctcacttgcagttcagtcaagtgattgtcaagacatcaataggaagttctgtgtaaacacaggcactatagctaatcagtaggatgtttattgtatcattgcttgtcaaccattatcaataaggatttgagtgctacaaaggagaattaactggtttctaattaagtaattatactacctctatagaataagaaattcattaaagacaatttccaatcattctgatcgttcacatatttggttttagcctaatatattgtagcaaaaagtattcagaaatagtacgcagctgccctcttgtgtcactttcatataattaaatctattaatgtttaccagtgattcaattagctttgcatttttaaaggtcaccatataccactacgcttccacttctgatgataatatcctaaatggtcatttacaaagtatgatatgtggaaagataccagttctctctaccaatgaaacttagtggcataaacatctaaatattgaagaggtaatataatttactctgtcctccaggtcctctcctcatccaaatacccagatgtcttaaaatgattctgcatcatctcattatacttaattaatacctaatcaatatttaatccattcttaatgagtgtatggatttgtactaattcttcactactggccactccacgaccccacaggagatgaaatggaagcaagttctctttcataattgccaagggcatccctcacaaagagccccttgtggtctctgttgccatttattaaccacctattatgagctaagtactgtgctacattctttacaaacagaatatacaacaatatgcataaaacagaaagcttatcttcatgtaacagaagaaacccagttatcagagttagataatgccttcccagaagccaaaggataatgatggtctcattcttcacattgtaacttggcaaaccaaggcttgtttgttcttttcttccacatccatctacgataataagccaccatacacgaatttgcagacagccagctgctcaacataccagaaactatcttactaaagtgagagtaagtttaaacaatggagataattaatggatgttctgtttctttactacgttgtgtttccttattgagtactctacagttccagctctgtatcacagttctctgcattatggaagagtagatataaaaaactgaaaacaagtcatattggtttgggacaagtaggaactgtacttttgcacaaatcaacactggtttggtggctacactcaataactgggtagagagaggatccagtagtgacacaagaagatgaaccaattgtacagcctcagtccctcatctcctgggaggtagagtccctggaagcacttattgcaaagacataggaataagatgcaatgtataaaatgtaagctgagatgtgacatcctgtgaccaaaaccagacattgtgagagtggaaagaggaggttccaagggtgccttgaaggtgggagcagggtgggagatgtagagtaaggaggtgtctgtgtttcttgttgtgttaatgcacacactggtggtgggctccctctagagtgggcacaaagcgaaatggatcctgcaacattgactctaactccatagagaggggagagatacctgcagatgggatgtgtggaagacggtccttctggagactgtaacataacaacagtgatgtggggcatgcaatagcggatgcccagctcaagcggatgcccactcattgccaagggttggagtcagaggagagacacaggggcccagtctagctctggagctgagcttcctgaggcagggtggggcaacaggaaagccttgagagtcaaaagtctaagtcccgggctcttattctagctctgtaattaacttgttctgtgaccttgagccaattgcctcaccttccttgttctgtttcttcatctttcacatgtcttccttgggcgctcagaaagtccctccattcctaatgctctctttactcaatcccttccaaggtagcttggttgtgtgtggccacccatggggactgatttgttttattattattatttttttgagacaatcttgctctgttgcccaagctagagtgcagtagagcaatcttggctcactgcaacctctgtctactgggtcctagccattcttgtgcctcagcatcccaggtagctgggattacagtcatgtgccactatgcccagctaatttttttgtacttttagtagagatggggtttctccatgttgcccaggctggtctcaaactcctgacctcaagcactctgcccgcctcagcctcccaaagtgctgggagtcactgtgcccagactgatttttttattcctgttgtgaaagttgtcagaatgaaactgaaatcactgatgttatggaaatcctgacaaatagagctgcgaaaggatatgaagggagggatctcaggtttgtatgcctgataataaaagaactctacaaaaccacaaccttgcacaaaggccattgcagcctaacacaaaaaatacttctgcaagaacatgtgtccagcaactgcctgtcaacctggggctggtgtcatccttgtttttgttctcagtagccaaggatgattatttcaaaacaactatgtaatcttcctcatttctgcctttaaaatccattggctttctctccctccccaaatatgcacaaagtttactatagcatgcagattcccattacagtactctattccaaaataaatatctttttcttttaaagagactctctgttagttatttgggttgacattgttatgggatcaactgtgcacccccttaaaattcatatgttgaagccctaggatccagctttcagagtgtgactatatttggagatacggtctttaaagagatgattaaggtaacataaggtcatacgggtgggccctagtctaatatgactggtgtccttataggaaattaggacacaggtacagagagaaggccttgtgaagacacagggagaagacagccatctgctagccaaggagagaggcctctgaaataaccggtccagctgccacctggttctcggacttctaacctcactgtgaaaaaatacatttccatcctcttttgtactcagttcccctctgggttttcctttctatttatattttcttccacttagcaaccttaaacactcatgggcaaagtccacattgtgccctctccccatacctcaacacaattatctttctccctctgatagggtttggatatttgccccttccaaatctcatgtcgaaatgtaaccccccatattggatgtggggcctagtgggaggtgtttgggtcatgtggacagatccctgacaagtgtcttgatgccatcctcacaataataagtgagttctcagtctatgacatcacccgagatctggtagtctgaaagagcatggtacttcccgcctctctctctctcttgctctctctcttgccatgtaacattcaggctcctccttcaccttccaacatggttgggaagcttcctgaggcctcaacagaagcagatgcctgcaccatgcctcctgtacagcctgaagaaccatgggctaaaataaaccattttacatcatcaattacccagcctcaggtatgcctttataacaacccaaaataaactaaagttctctctctctttctgttctataacgcacagcaattgtatatggagaaatgaagccattaacatacaacatacacaaagcagtgtctgtaactaaaagagtacacatgaaaacgaacacacacaatggcatccaatgccaggaagggcttggtgaaacagacactcacataaactgttggtgggagtatatatttgaggaaactttctggaggttaatttggccacatacatcaaaagttttaaaagcattcatacccacatgctgaatatcccaggaaacaaaatgaaagatgaggaagttgggcggggggaggaactgaacttccaatggccaacttcactagaaatcacagaaatgaaaatgtgtgaaagaggaacactctattaatggtgggtagctaaattggttaatcttgccaagagacaaattaataatcattattaaaatcttaaaattatattttccttttgtctcagcaatctcattttaaggaatttagcccaatgaaataataatgaaagtaatagtaagaacatatttactgcaatattttaagagggagattatcttttctagtatttttatttccataggtttggggggaacaggtggtgtttgattatatgagaagttctctagtggtgatttgtgagattttgatgcacccatcgcccgaacagtatacactgagcccaatttgtagccttttatccgtcacacccctcccaccctttcccccaagtccccaaagtccgttgtatcattcttatgtgtttgcatcctcatagcttagctcccacttacgagtgagaacatacaatgtttggttttccattcctgagctacttcatctaaatgtccaatgagagggttaaataaataacaatttgtccatatgatggaatcatttacaaaaatgatttaatgatcgcagaaatttttcttacacaatgttaaatgggtaaaaagtacaaaaagtttctataagtattgctaaaaatgtatgcatgtgtgtaaaaatactctggaaaaatattcatcaacacccacaattcctgatcatgaatctccccacgtatttttttttcttctctgtactcttctgaatgttctccagtaaggcggggttactttaagtagaaaagcaacacatcattttaaaaatggaaaaataagccaggcacgtgtctcacacctgtaatcccagcactttgggaggtcgaggtgggtggattgcttgagtccaggaggtctagaccagcctgggcaacatagtgagaccctacctctacaaaatttttttttaaaatatcaggcaggcatggtggcacacacctgtagtccccactactcagcgagctgagatgggaagatcacttgagcccaggagtttgaggctgcagtgaaccatgggcacaccactgaactccagcctgggtgacagagtgagaccctgtctcaaaaaaaaaaaaaaaaaaaaaaaaatggcatgggaaggaaagaaaaggaaggacaaaaatgaagcacacacacttgagaaagggacgatctattgcaacatgccacaaatctgccttacaggccctagtctgagccctgctggcatcatgtgtagcatcacatgtggaagaaatatgtattagatgtttaagaaatccaagttaaaatgccattaaaaaaacagatgagaagtcccaaggcaatctaactgcccagtctacaagaggaccagatggcagcctagagcgccatactatactctacttgggaaaaggaagtactggacttggaacaggagaagatattctgacttcctatccatcccgtgaagaccttgttcttcttttatcttaatttgcaggtgcagagtcttaaagaaaatgagacactgacttcctggcctgagataggagagtctagactccatgaagacttctgctactccaaagcatccttgctgtggtttgggtgatcaaagtcaggccactgcttgggatcacgctcctcagggcatatagctgggctgatgaccctactgggacattaaaggaaaaagaagggcagcttcagacaggcgctcattcctgtcctccgtgtattaggtagatttggagtatagcatgggaagcagagtgggggacggaagggacacaacggcaaaagacagagaggggagctggggttttatctgcccttcaaatcaactgccatttgactaagttcccagttggctcaggtcctcgtcttccaatctgtaaaatggcacacttatgcgatgtcctcctgaaggtgggggtggactaaagctccccgactgcctgaaaacccgtgagtctgagtaatgtgcctggaagtggagagatactgccggctgaaactcatctgcctcagtagtattcagcagaaaacagagggtctgctcagtttccctctgacttccgtaagtttctcaaacataaaaaaaaaaaaaatcgacaaatggctgaggaatcatagaatcccaaaatcaaggaatgtatcccttgatacattccataacgcatgaagtcaattttcagcattttcccagtgctttctaaatcaagaaaggctaagctacaaaacagagtgcagcattattttggagacatcactaaactgcaaaggcatgagaaaataaataaggacgacctgcggagattctacttcctgattctgagataattattattaataagtaaggaataataacttcctgatcctaaaataattttgaaagatacatttctgcttgaaactaaaactttgactttttcaccgaagtgagatattcggagtttcaggtctgccttggcttcaaatgttttcttccttctcttctctgccaaagatgatcccgtcccacagataatcacttacctgtcagggtcaccttcggcattaaggcttctcacttactgctaagccccatcctccccagtggatcataatccagctctttgatctgtgcatgaatatcattaaattgactgtcaaattcttaaaggttatgtatattatgaaactactattgaagtgtctcagtgacaatcaagtaacttatatcaagaccagaagccctgttcaaagctctgaaaatgttttagtgttttccaaacatgaaacctttgaatgatcctaagaggctgcacaatataattatagttcttataccataaatatgttttgtttgccggttttgaaaataaatcatcccagggacccaacctcctacccaacctccacgtctttctaggatgtaaatcacagaagatggaaaaatcccccctgggcctgcttcttgtttttccagctagaggttggttacaggtaaaagccacattgaagtgctggagctgtggcccagacactcctggaaggaggcttggcaggtgaaatgcacaaaacaagtttatcctgcaagattttcaggctcctttcctcccagtcccactgaggtgaacataaacagtggaaatatgacttgtgaataaatcctgagttacaatatagatgtgacactatagttagatcataagagctaactttttaaaaatttttacaaaaatcaacataccaaaaagatgtagaggtccagaaatcattttatgtagcactgttggaagccaaaacatttctttcgaaagaaagaagtacatgcaaccaggaaacgtttgtaaatatcaatgagttttcctacaacaagcattttgttaggcattgactatgggaatcaaatatgtccaaaatattcccaattgttaatttaaatggcccaaggtaaagtgtgcgagcatacagttagacttttaaaggaggcaggtgttcaaaattcttgctagaattctataaacaaagctgtgacttacctcacagcaaggatgtattctaaatgattacaaacaactttcttgcactgcaagttatttttctgtatgttgcccaggtattgtagcatatctaactcataccacatattagatgggaatgacaatccctgaatatgttaaatctaaaatgggagaacacagtatttttaatcagactgtaccataataaactccagtaagcacacgctgtcccaaaatattcagggaggaagtaaggatacacaggaaagcctatgtaataaccaatcatccaaaaaagggaagtgaagtattccacatctgtaatgctttgtttatataattaactctttgcaacctgctgaatcttattaaagtgaaataagtcataattcgaataataaaagggtgtgctgacacataaatttgtccatatggatgcactgacttttgtccacaaggaatttaatggtattaaaaatacaaaaccgagcattgctactgaaattaaaatttgggagaagactggagtatttctgtcactaactgctggtgactacattttcccatgtgtctcatgcttacatgaacttggatggctctcagggctcaaatagcagttcctcaaagaactcttccaggccctccctcctgagtccacagatcgtgggtcccagctacaaggactccaggcacactaggcttccctttcatgacatctcttaaactgtaattaagtaattaattgtataagtatataattagtcgtttgatgtcagtctttccctactagtatgaaagctttatgaagaaagtgcctgtgttctgtgccttgaatcaagcaaacactgaataattatatgtcgaatgaataaattacaattactgtttcttctgttttcatcaagagccgtcactgagtaagcctggaagaattaagtacttctgaataaagctctgctaaaacaactccgcttttatcatcagagcctatgacactctctaaggtggtctctgctatccccttcttctttgccaaacattcaaatatgagtgagaacgttgtctaaacccccaaatccttcctttgtacatatgtactagtaaaagtgaaattcatttgatattagttattgatgcccttcccagggcccggggaaacaacttctaactactaaagtgattttagataggatatataaataacatatcataaagcaaaacagtaaaatttaaaacaactctgtgacattttaacataatgtaatcggcatttcaatcacattttctatatagtggtttgtttgggggagggggtacattgtgcaactctcctgcttatccataaaatttgttccttgtcaaaatgttatttttttactttgtcagatatgaaaactatgaagccaggaatggtgaagcatgcctgtaacctcaacaatttgagaggctatggcaggaggatcgcttgagcccaggagttcaagaacagctctggcaacatagtgagaccccatctctacaaaaaataaaaaaagattagctaggcacagtggtgtgtgcttgtagtcccagccactcaggagcctgggagatcaaggctgtagtgagccataattgcatcactgcactccagcttgggcaacagagcgatacactgtcccaaaaatgtataagtaaataataaccctataatttgtgccaatggatgtatatggccgctttgttagtctaagtctcggattgcttataagccatagaaagcctttcaaaggcacctccaggaaaccttatgtacaagtgtggaaaggaacgtaggatttggccttgttgggggccctaagggcacacaggacagcagaggaggtggcctcctgggtgggcgagctttgcatgcctgggatggagagtgggtactccttgggaagcaggagctgatgttccctcgtaaggggaccaccattaacaagaacctgtttctcccgtggccctgtgactcctccactgccagccacctactttactctgtctatgctaagtatcttttcccccatttcatgagttcttttacttatactttctgcttactcacagcttaggcttcctcctgacttctttctctacgttttttaaccatacaacctgagagccaacttgctttccctcttgaactcaggcctcttcagggggatctgagcaggttcagccaccaccatccctgttaggcaaagtccttgtgtagccctgcagagtcacctcattccaatcagctgggaccagggaagtgagagcatgtaggacagagcatggttatccacaaaaattaatgaaaaagttagctggggccacatagccttggacagtagccctctggaaaaaaaggcaagaagtgtgactgtcttgtgttaagaatcagaaactagttcccttcaagagtgatcttatgactcaatttgggatgcagaaaagtttcctctttcctcaggtagaataacaggagtttagatgttgtccatttctctattttagtttactattccctttcatgtttgctgctcaaaacagaaaaggaactggggggtggggggcaggggaagctacaaagattaaaatgccacaacgtaaacacaaaatcagcaactagactcttggttctaatattgacttttcaccttttgaatccattttctcattctgcttttttttgtcagaactctgcagctgccaaatacaaatataatagacaaaggcctgagaattttgcttagaatgacagaaaggagctaaagttcacaactggaccatatccagttttctgccacaacaaaactcatattcaatccctctgtgtaggagaagcatatattagcccattttcacactacaataaagagctgcctgagattgggtaattaagaaggaaagagatttaattgactcacggttcagaatggctggggaggcctcaggaaacttacaatcatggcggaaggcgaagggaaagcaaggcgctttcttcacaacgtggcagaaaggagaataaacagaggaggaactaccaaacacttagtaaaccatgagatctcgtgagaactcactatcacgagcacagcataggggaaaccgaccctgtgattcaattacctccacctggtctctcctttgacacgtgtggattatggagattatagggattacaattcaagatgagattttgggtgggaacacagccaaaccatatcaaagcagattatatgaagaaaaaaaaaaatccccttttacctactttttagtttattatatatttttgtagaaacttattttggtagaaaagttgtttggtgcgcatgtcatagttacccgtaaaacctcacaaatgtttaagaaaataaaattataagcacagtctgtttaaaagctaaattattttttgtcagaaaaaaaaaaatctaaggtattcatttcctctgtggcctgggttacaaagagtaaatttataatcgaatggaaaaaaaaaaagtctcagagggaaaaaaggtagtgaattcttcaaataaataactgtgctgtcttgtgatttcaaatacagtgtgcttgattcataatactattaaaatattcatttcatacttacggaatatgaaaaacagaaaatccaatatttggaagaagtgtttattctacgagcagatgtcatccgcaaagtttatcaatttacaattaggaaggattatgagccaaagagaaagttttacaaaataatacaataagactagcatccaaatcgcatagatttatatgagtgtgaaaaatagggactcactttttcaattatgggaagcgtagtggggggagaaaagcaattgtgttctgtgataaatgagcctttcttagctgagaaatcagttgcttcccattttatgtactcaatttgtgcactttctattctatgctccaaaccatttctttcatcttatgaatagaagaaaattagaattgtactattgaggacatatgaggaatttattcttgaaataaattaactacaatgatgcattgttgcggtactttgatataaaatcagaaagatactgagcttggagaagcataatattgttatcacttacaactaagtttatttgggggaggaaaatatcttgactgattcaccaatgtaaatgcactgaaggcagcacacacctctgatgcgatttgatgtgagttgtcatgttaaatctcagacccggggtattattagggtgcattgcttgcatctaacaacccatgctccaagaaaccacggtgagagccaagaagtgaaccattttttttatatcctgcatttatttaagcaaaccaaatgtgtagagataggaaattaatgtgttataatgttttacaaatacagagagaaaacacagaatattaagaccctgaagagagtgcatttgagaacgcagttctatcataggagaccacttgcagggaacacattaaagccattgctgacacagccatctgtcattcctggtttgccgtcatttaagtagtttcaatagataaatcggtgatttgcttttaaacaaatattaatgttaatgattagggtagccttgaagggtttgtgagtgactgtactatacaatgtgatgctaggcttaatgtgtcatttcaatgctgttgtacattatgcaggggaaataatgtcttattacacattaactgcgacatccactaaaatgtgaactagtttgcataggttagtcctttgggcagcacgatgttgctctagtccaccaaggcttaaagattcacagtgtagaggaaaaaaatatgaattaaagcatttctactaaaatatattttaatagctggtgttaacaatttgcataacaaaagccaaattatattagtaacattgtaacattccgtgaagccccttcatttgcaaaacattcaatgttttcttcaaaactgttacactctcaaagttagtctcgcaaattaatcatcaaccacaattctacatattttgaagcaaacagaagccaaactgtacaatggttcaattttgatcacaggtcaaacatcaagtttcacaccatgcctgtaatagacttggtgctgcttcctaaatgctcagcaattcattgcatggacactggagaatgggactgtgatgcagttttctcttttcctttaaagtacatcattcttaacagcaactggattacaaagaagtgatactatgcaaactggataccatgtatcaagcacaaaaaatcctatggcattcccaggaatatactgaagtcatacagacaactgagaaaatttgctcaaagattcttccaagtttatgggttcaagtagtctaagcatcacagaataataaccacagaagcaacatacaatgccttgacttttttgatcaacagttgacagttagttgcgaggaaagggtccaaaaggcatggaatacttcagagacttttattttagcatccttgtcagtttacatagcttcttacttaactaaaagctctcccacctccatatcaccttaaccaaaacaaccacaatctagccacttttagattatcagaagcaaatcgctaaggtataattaatttatgaagtgaagttcatcttgtgtagtgaatccagcctcacaattattctatcttacaataggcattttaaatcccaaatctaaagttaatgtttatatagctcaactctatataaatccacaaagaacctttcagaaatagatggaagaagtcggcattttctaaagttctaaatctttagagataaaatacaatcagctaacacctttaatatctgaggagcatcccacttccctaccacaaaaatatcaatcatgtgtaataaaatattactatagaataggcagcaacttgcttgcttggttttctttccaagagcatactagacaaacaagagtaatcaaaaaggcacctatatttgtatatatctgtattacagttttggtatatcttttatccactttctatagggatgtgttattaaagatcacacacattttcttcatcttttattgaaaacattccactggagatggatgaacctgaaaacgaggtacatcccttgaacttccactatctttttagaaaaagtcttgttcctcattcccagagtgttgtcaagctcagcatggagaggataaggaaagactgtggcacattggaaaaaccagatctgcatcttcttcaagaaataaacccagtggacagagaggggctggtctaatcttatccatattcctacaaggtgcttgtggaaactgtgcttacaaatgcctgtgtggtgtatggaggtcgaggagacctgggatcatcaagagcctcctccatgggcagttgataaccaaataaatatttcaaactgggctacactgcaagtgtgtaaacaataacaagaagacatgaaggattcattttgccataggttagaaatagaaagctttctagagaacaagaattattagtaaaaacatgtactacaaaagcttacaacaaaagcaatatattctgttgctatactttgctcaagagagagaggatccctatacagctttgttttcagaaccttttaaaagtgtatcaaactgttccttgtgcttctgtcaggcttgagaacacatcaaactttagaaagtcaggtgcatgctctctgtgcttggacatttacacagtcatctttaactcaatttttaaaatcttctttagctgtcagcttcatgcacgagatacctgttgccaaaccaaaggtgggagggaagcacgtggaaagtggaaaagttgttcaggcatgtcatttttttttaaatgatgcttttaaaaatagcactttggttttatacatataattttccaatatttctcctgagatgcttaacatcctgacaagctttattaacaactgccaacactaccaaattatggcctcaagagcatgcaacatcttgttcagttttagtcttcattgtaaaacaactaccctttagttaaattctgatcagatcttaattcctaaaggcttgaagcagaaatattttgctatgcaaacattattacgtgaagcttaaaattttaggagacttattcctcaaatatgtattgacttttatgctcagtgaatctggttttgaaatcggtggatgaaattactttcctgattacaagcattatttcaagtcagttttcattgcggttcttataaatgtgctatttatccaaaattgtacctgtcctatatttagtctgaaaatttaatcaacaactactctttcttataatcacaaaagaaaatggcctgcctgggtgaaatgtaaatatatacttagtaaaataaaattgagcaggtattttatcctcagttttaacgacagatttttttgcaaaaatattgcaagttcagtttatttttgtaggtttgtgtacaatataccaaaacagatatggggttttatcactttaatcacgactggccatttcagtgagagaaaaccagccaaacccccttaaaagaagtctctagttatttgcctgcatttattttttcaactttatgtcagtgacatatagatgcagcttcagtgtaataaagcctatttacccttttagcctaataaaatgaaatcacagattttcaaaagcatgtgctaacttttctaaagtggaaataaattagctttggcctttggactagtaaacgtttccttaaacgatgttttacaggatgttttgttaatttccttgaatataacatataaggcagatatccccaagacccgtacatcttagtacttttttgcagttttgctttttcggttttgtcatagctgtgaagtcagaccctaagtgaatgccaccccgttgcaggtcacagtaaacggcacaatcagaaaaacacagggttgccgacgggtgccgctggcttggtgacctggactgcagactctggatgaaatttcaagacccaccagcaagggctagcataaagcctgcaaagtcacttattcgaaaatcaaaacatggcaacaatttctttcttagagaacaggctcttgggcctgtactaaaaaatctctgatgacattcctgtttcattcccttaaaaatgatttagaaaataaaagcaaaaaaaaatggaaaaggacgtcttttgattaacccgttttggtggctagatttccattccagaatttgaataccattttccaaaagaagataccagatcatctctgtatggaattggtaactttgtttgctgagtatttttccagtcacactccagcttccattgcttcactggcttctgttacattttcttcactttgaaatcaatggtggcattaagttaatcaaagctgttcaatggaacacctaaatcgcttatttactagagtatacatgttatttcctaagatgtaaatccttcaaaactagagtgcgatgcagcaggaaaatctcaagcatcttttcaaagtatgtttttctgatgagctggcgactagaggaagaaagggcttttaggtatcagtcaccctttttgcttcaataataggaacgcgcagtgcagctgcctatgttacagaagcttgaatctacatgacatgcaacagggtaaatgctactagggaaattatatcaatgacattataatttgccctttgcagagtagctgtgaagttatttggtcctgacattctgtggaactgagcatagacttgggtccatagaatataaatggagagtaggagatgccttggtacaaatgagaaataaatagataccagtcagcctagggaacaaggaaatttctctgtttagtagaagtttctagatccctaaggccaccagtcaatataattttaaccagactgtccttctgccactgtttacacttattatattgggcaattttcactaatattggaaattgcctcatgactcaaaagcaaaacgggtttgaaattattggctgcattacagagttaagagaattggcttggggtgattccaaagtgacagctaagaagtttcaaacacacactacatttaagggacaatcaacttctctattaaagtctacaaaaatacatttcccagaagggttcaatagccaatcaaaggaaaccatgaacacaattagcagcaccaggtgtccagacacaaagatttttgtttgtaggaattactgaaaatgctgctgttttcagcccagaggtcattccttcttcctggtacctgtgtgtctaattgtcaaaggaaggatacatcattgtaaaataatggccaagttgtcttaaaagtatcttctatcttttaaaaagattaggtttgggatacattagaataaagctcaaagggcagggagaaataattaattaacaaactcaatgtaattcgctgggagcattcctgttctccctgttctctgcactgtgccgtacatccagccatcgtcaataggctgcacgttgacgatgtagtcgccgtctctaaaggagacctcgtcttcatcctgggcactgtaatcgtacatggctcggtaggtcctctgagaaaggaagaagggattatacgatgaatgccgaaatagctacagccacaaattccaatcacaacacaccgacccacacataaagtaactattaggaatgttttcaaacacatgtatctctggaaatctgtaaacctagcatctcattgtgctgatctcaagtttactagtctagcaaatagcttaatatttttggaacagggatagaaaagtcactaaatacgacaggtagcccatcaaaaagtaggctttgaaataataaagccaagttccccccaacttcagataaccccagaaaccttagataatatgtgatttcatattcttcagagaacaaaactcgtcatatgtcagagaagttcaaatctctcctggcaatgtacttttcttaagttgatgctaaaaatgttcatttcctcttaaaactatgtaaaacaaatgaaagaaaaaactcataacatactcactatataggtttctgtatcactatgagagaaatttagcatataagtgtcctgaatgttaagatacatactcaattgtacttattatattatgattataatgagttttcctatatttgtttttgtttaaggctaagcatttagctaacattaacatcagacaatctcaaaatcaagtacattcacagactgaggacatggctgggacccaaagaattttagagcaattcaagttaccggacagtgtagaagagttttctaggtgttgaggcaaagaccaagagactatgttgagggcttgtagaagaaatttctgcatgagaagccaagtataactagcaaatgttgaacacttcttccaagttttacactgaatatatgaaccagttcttcaagatttccaatgggggatttgaagatatattttggccacataatttaggcttttgtgttcattttgattaagatgaacttgtaaatacaaccatcaaatatccatgctcctaaggcatgagtaaagagcataatcggctagtaccaatcatgaagtaacaattaggatactgtactggtagattctttgtatgttttattgttttatgtaatgcttattaatgccttcctttctcaacagtttacctctgtaagttttttgcttccttcaaaagagttgtataaatggcaacacatcatcatttatctttaaatgaaaatacccaatattcaattcaactctattccacatgtatttacatgcttgaggggaaatgggaagaccagctaaggaggaacgtatcaaatggacacttactagatttggtgaatgctgcattgatctcatggatgacacactggtctggtgcatgtagccatagccttgggaatggctttgctgataggctccgggaagaacaggtgctgcatgttaaacatacacacacacaaagattccttaaagttagcctcgaaatacccatcccaaaccctcagagtgatgttatgctctgctagaagcttctgaaacaaaatgccttttcagtgttgtgaaatttaagttgcagtgttataagtgatctctagattagtagaaatcttagtaattagggacacataaagaaactcagcttagcatgcagttaaatatgctttaaatattcttgtggctctattgcagatgctcagttaaaaacataaacaaaaatttttcatactcccttaatgaaatcatgtttttattcgaccatgtgatcctttttggcattttccaaaagaaaaataagaattttaaaggaatttaatgatagagtataagtgttttcacagggtatttctcatataacagatactgtcaatatttcaagacatacagctgaatgttacttttacaaagacggcaaacataacgtatgtttagcaacacgtttgttcggtagttaacaaaaagtccataccctttaaagaaacatttacttagaatatatgaagtctttgttttatgaaggagtgatattcagctgacttatcaagactaaataagtcagctaaatacgttacaaaagcctgagaaaccaaatccttaaagaatttcataaacattattcttctatattaaaaaagtatcaaaatagtattcatttagtatgtgctctccaaaccactaattatgacattcaaaaggcatagttcctgttttgaagaactcggaattctagagaagccaacacagaagctagattttaaaaccccacagaatcagcagacatatgcttgtgtgtttctctgtgaatgtgtttaagttatctgtgaccagaaacatgagctataaatgagggtattttcgtagcgtgcccttcattgtcttttgaaaaatttatgtgctacattagtaaaacttatagtcatatgtgctataaaatatataatagtttgccatttttgtttaatcaggttgagtatataaagtaattataatgggttgatttattcagaacagtttttataataaaagaaataagatttaattctgagtgttatgaataattaatattttataagtagaaaattcactctaataagtgagaacatcaatactttaaagaagtttaatcatcagaaaattacaaatcatttaatatgttctccagatgataattatattagattgaaaggggattttttaaatagttcttgagtgaatttatcttataaagttattacaaattatgcttaatgtccagataggggaccaaagagaaactgccaagatctccacttgaattatagtatattgcaaagtcattaaaacatcattaaatatcaaatacttcagaaaagaacactttttaacattatcaacaaaatttaaatatttgatatcaacagatgttaaagatattgtcaaaatccactcacgaagaaaaaagaatgaaattcccatagatctccaggcccacttaattagctgagtagggaggcttttctatattagactctggaagccttgtccattgattcattcactgtctctgctctcagcaaatatttatcagttaatgcgtgcacagagcatactgcatttcctggcacatagtaagccttcacaaatggtaacaataattattactgtccactatgttcaaggcatgccaggaagaaaaggggtgacaaaaacaattgctctcctggagcaccgagggtcttgggcacctggccttttacccaattaacaaaatggcactggctactcacggtatttccaattaaatgattcagcctgcatactccagactgttagtcttgcactggtttttaaccatttaaacaactcatggcttcattaattactacttgaatctatttgtaaagtttgaaagattaaatataaacatctctgtaaatttataaaaattaaattctaattcattgttacaccatttaactgtgaactttaagttttaatgtgtagaggtaagcacagccatctttaaatgtttaagaaaaactttcaggaatggacattgaaaaatttgggaaaataggctatctcacactctgtaatacatttaggttcacctagtttatacatcacagtcccagcttagtgcctgttaagtgctgacaattcaagaatgttgcttaacaatgttttctcattttggctttcaaaaaataagtatgctgggtatggtggctcatgcctgtaatcccagcactttggaagtccaaagcaggaggactgcttgagcccagaagttttgagaccagcctgagcaacatagcagactctgtctctactaaaaataaaataaaacaaatagctgtgtgtggtggtgcatgcctgtgatcccacctacttggaaggctgaggtgggaggattgcttgtatctgggaggtcaaggctgccatgtgatctcaccactacactccagcctgggtgacagagagcaatcttatctcaaattttatatatatatatacatacacatacacacacacatatatatatgtatagatatatgtatatatatatgtgtgtgtatatgtgtatatatatatgtgtgtgtatatatatatatatacacacacacacatacaagttatatttatgcctactccttacttatatctgactttgaaagggaacctgtgctactgttaaatatagcaagaaaagaaagtaatgtattagttctaaatgtgtatatgttgcagacagcagggaagggagtttagaatgagaaactttggaataaacataagccatctatctagcccttgcagtttatcttcatgcctttattgattattctcatttgccatctggctgaattagttattaaaaagtttctttgggattataaaacctagttatctaccttatacttggtacaataaaagagtttttagggaactcctataggggttataaaaaaaataactgatgggtcacacctgtaatcccagcactttggtaggctgaggtgggcagatcactggaggtcaggagttcaagaccagcctagccaacatggtgaaaccatctctactaaaaatacaaaaaattagctgggcgtggggtgtgtgcctgtaatcccagctactcgggaggctgaggtaggagaatcacttgaacccaggaggaggaggttgcaatgaaccgagatcatgccactgcactccagcctgggcgacagagtgaaactctgtctcaaaaaaaaaaaaacaaaacaaacaaacaaaaaaacaaagacaaacataattgaaagcctaaagaaatcaacttagtaaaagcaaacagcaatttaagaagaggcataaacactgcttttctattgttatgctacaggaatgccttttttggaaacttaggtaaataaaacaagcaaaaggaaatctaaagcaatggcttcacatttggttcactgagaatttggttgaaagatagctattccatgtatgagatttcttccatgaacatgtggaatcaaaggatttttaaaaagtaagatgtcaggttcatttggcaacaaacaagggcttttcaatcaaagagtaaaagcatagtgccctgtttattaaactagtcatcagataccattagcattgctacaaatgggggacaatggcttttctaaccaaagagtttgagtttgacaggttgttttatgtcaacaagattaaagccacaaataatagttttagttatactaagtcaatgaaaatacacagaagtgtgactcaactttcacttcacattggtaagatttattgaccaaagatctagaagctgtctaaagctctaagcatttcaggctctatatggaatattctacaacatttataacatcaaaatgtctcttctactgtacaataaagtacttccacagataggctattttctgcttaatggttattattaaaatggaaagagataaaaccaagataaagaagtgaatacatgtgaagatcataaaagagaagatgaaaagggaggaagaaaagttttgtttttttgtttgtttgtgttttttgagatggggtctcactctgtcacccaggctgtagagtagtgatgtgatcacagctcacttcagcctcaaactcctggactcaagcgatcctcctgcctcagcctcccaagtagctggacatacgccaccatgcccagctgatttttttttttccctacagacaggatcttgctacattgcccaacctagtctcaaattcccagtctcaagcaattatcttgtctcagactcccaaagcactgggattatgggcgtgagcactgcaccatgctaagaacatgttaagaggctcaccaaatctgaaactggaaaagaggaaatatacgtaaatacacaaagattagagtaaatgaaaggaagaaatgtacccacaagaaacgttgaagagtactcaaaaagaagttcactgggggggatgtacgcagagtgcgtgaaagaagagaatatgattaagtgtccttggtgttcatggtgctttgtatgccatcatttaattactgcaacaactatctaaaacagataccattcccactttacagaacaaaatacaacagaggctgagagattgaacaggaaggcagcaaaaaaattatttgtgcagtgaagccacagttaaggtttcaagtcatcaaagaaaaggtgaaggttttgaaggcccctcaatgactatagagatacagtcgatggccaaattccaaatagaaaaaaaaaaaaaagaaagaaagaaaaagaaaaagaaaaaaatggtactttaactatagatgtaatgtgaaaagagaaaataatttgggttttttcctatgggcttactttttgaaaaaatccagaaaaagggagaaaatcaccattcagaaatttcccaataaagagtctaggacacaatgcaattattgtcatattttctaacacttgactactgttttatcagctaatgtatgtcaaataacttaatgaggttttgtttttctttttaggacaaagaacccctatttagacaatcagagaggaattgctaaaagagaaagtaggactatgctgctagttttgaagtaagtattaaataatgaactagatcctagttaaatcctgtctagtcctggccgggcatggtggctcacgcctgtaatcccagcactttgggaggccgaggcaggcagattgcttgagctcaggagttcgagaccagcctggccaatatggtgaaaccccaactctactaaaattacaaattagctgggcttggtggcaggtacctgtaatcccagctacttgggaggctgaggcaggagaattgtttgaacctgtgaagaggaggttgcagtgagctgagatcgtgccttttcactccagcctaggtgacaagagcaaaataattctgtctcaaaaaaaaaaaaaacaaaactcctgtctagtccatgagcaaggtggctgtgctgcttggttataacacacggccatggtatggacctttctgctcaaattgcttttacacgtgtcactgagagtttcatgtcaaagcctcaagtcctattcacatctgatcacaagacataagtgggagttaagtccacaaagtttatatgcaatctagaaacaagatgctattttttaatctgaaaggattcttagcactacagaaaccccttttccttccctgcaggatacagaagcaagccagattgcctctagattttagtttgcagattcttaattataagctctgaatagggaagtgccgaagaaacaggcttactgcataataaactaagaatacccagacttcaatataaaaatgaagtgctctataattgagttaaaaccaccaagttttaaagacatgcctaatcatcgtgatacaaaataattaagctcaagctttgggaatcatttaaaaataaaagcagtcattactgttttatatgttaaatcttcagtttcagcaggagcaacaaaccctggaaaggaaggacaggagattaaggactgaggacagaggaagaatcagttacttgcagtgttttcaaccctgactgcatatgacgttcaggtcccccacaccaattataataaatcagaatctagggtggcggtaaaggaaattgcataatggtgtcttatttttctttctttcttttcttttttttttttttaacacaggatctggctctgtcacccaggctggagtgcagtgatgccatctcagctcaccgcagcctccatctcccaggctcaagcgatcctcccaccacagcctcccaagtagctgggactacaggtgcatgctaccacacccagctcatttttctgtgtttttcatagagatggggtttttccatgtttcccagactggtctcaaactcctgggctcaagccatccatccaccttggcctcccaaaatgctgggattacaggagtgagccactgtgtctggctggtgtcttgttttttcaaatgagcagccacaatgcggacctaccgaactggcgggcttcattcacccccatttgacaggaatttaggggtatatgtggctctattttaaacatgctatttccccaattccctcttttcccccagtgctttgtttccaatatctgtggaggcgaatgtttgaacctgggcctcgggaagcagcctgggactgcaggaagaaatccaagtcaagagaaagctcattgtagaataatttggaggttagcgtgcaacattcctgggaaagccagtgccacgaggcgaggggaagcggaccccatttccttggggtggagcagagcaggacctggcggtcatcagctgagaggaaggaggaagtgtacagcctaaaatatctttgcaaaatcaaaaatcctctctcaagccaatgctaggatcctaataatcaattctcctcttctagactctcatattatctttgttttaattttctagttttagctaaatgttatttctattcctataatgtatcctgtttatagtatatactatatcctgcttactgctgaccatactacagtaatacatactacttatagtgataaaacaattatcgccattattactttaagattgcaaatctatttattttggtgaaatatacataccataaatgtatccttttaatcgttaagtgtacagttgtttgacattaagcatattcatattgtgcaacctgcatctttataagaaaatgcaacctacataaaagtatttaagcactcaggtgtatacccctgtgaaagttagtgggggaaagaggtaacataagactctacttccccaggaatactgaatctgcacacaataaaagtttaataatataagtaaaatgcttacaaccccgttagctcaagattttactaatttagctcttaaagttctgcttttcaggaacatccttagtctcgggcaatttgggatgttcggtttttttccttacaatgttccagccctgcgcttaggatgtcacatgctttagttggtgtaactgtcaccacaatcttcttttcaccaacaaaggagctgaaggttagcagattaagtaatttggtcaaatatcagaaatgagggggagccagaatttaatgccaaaaatctgacttcagaacccaaactcttgactatactaaacctaaattattacagaagaaatgacaaaacagtgtgagattaatttcaaaataaccactgtgaattcagaaaagtgtaagagtactatggcatgttgagcagagaagattctaggagtaagaagactggatctgaagtttgaaaaggaggcggtcaacccttcctgcttggggcagtagaagtgagaaagagggaaaggtaaagaaaaatgagtttaaatgcacaggatatgtgccagccaggcttgttaggctcatagaggttactctatttgtcattaatttgtgtgtatatgtgtggtaaacatccaaccagaagtttatgtgtatgtggttgatgaggtatgctaaaacatctctggaagaaattgtagaggcagaaattcacccacttttggaaaagcaaactcaaataaagtagcatcatttctgaagcaatgacttttagatttattgtaagagtcattttagcatctgacaagtctctggggagagagagtgtgcgtgtgcaatgtgtgtgtgtgtgtgtatgtcagattaatttttctttttcccattgccaataccaacctattttatccagggcaaatatttagtcgccttatcttgtatgataaatttcaagcctatgttcaatatcacgtctcctaatgtgacttcaaccacattcccactgagtgacaacagctgcatagtgatggcacctaacaatcttcaaagtcactgtgtacaacgctgcctgaaaaagatctcccaccatcagtattagaataagcaatgctgtcaccaatatatgaaagatttagttgaaaatacaattaattccatgagatttttaaccattttcttccccaaatataaataaccaggtttataatattccttaaatattaatggattaaagattctttattgcctgtgaactgcaaaaggaaacatacatactttgtactttttaaactacatatgcagacattacatttcagcacttcattgatatatttgacttagttgtctcaaatgagaacttctaggctgggcacggtggctcatgcctccaatcccagcattttgggaggctgaggcgggcggatcatttgaggtcaggagttcgagaccagcctggccaacacagtgaaatcacacctctactaaaatacaaaaattagcagggcgtagtggtgggcgcccgttatcccagcttctcaggaggctgaggagaatcgcttgaacccaggaggcagaggttgcagtgagccgagattgcaccattgcactccagcctggggtgacaagagtgaaactcagtctaaaacaagaaaaaaaaaaaaaaaaaaaaaaaaaaacttctctaaaatattatcttggggactctgcagttcctaaatattgaaaaaacacacaacattagttgtatttttaattttccaccagttaaacttaattagcctcacaaaccaagaaaatcagtacattttgattttgaagccaactgctttttctctagaaaaaattagtctgcaaatgttctgacagaactgagctaaaccataatatggtttaaatacaactagatagctttagattttagaatttctgctattttacttcagaataatctagcccatttacttctacatttagattcgaattgccacttccatttttttccctcagatttgtttctcattttatctctcttaggataaactctgcaagttgtaactataattcaaaccacaaatataagcaggattgtcggtgagggaaaagaaaataatttcttccccaaattatagagtctttaataattattctcatggcacaaaatccatatggtatatgtctgtgtgcacatgaacacgtgtgagctatcccccaaaacaagacagaaagaaaagaaaggaatgtacagtgcagacacatatgtagcttcctgataagaactacgtaattctgggcagttcttcgataaggggaaagcaattcagaacatacaactggcaggtagacagagatgctatttccactcatgtatccctatcaccaagactagcttgtagatgcaaattatgccatgactgaagagtcagctaacagcaaatcccaattttcctcagtgaatactactgtccatgttgtataaatcaatatttaatatgaagattcattactcgagtacaatgaaagaaattgtcattattccactgcagaggatattctagaaatatgtattggatcaatgcatgtaacattttttaaagacttaaaatggcattgcctttggtttttcttgaactaatgtattctaatactgacccttagacaataccatcaatccataaggagttctgatacgtagttttacactagacatcctaagtgacaagccacactaaatatcataaatagacatatcttggtgctgattaaattgctgaatgggcacatatatattttccaacaaatagacatatataaaactgactcgatgtgtccccaacatgatctcaagatacagaaatacgagaaagtaaatgtgaatgattgtctgcgtctcagagggcccaaattctctatgtgggtctgaacaaacaggcaggtatgaagattccctgccaggtagggaggtcaacaggttgactgcacacaatcgtaaggatagttagacaggagcaaggtaagaacttgacagacagaacagtagacaagtttaacacacatgggtcaggtatggcacaagaataagatcaaggaccagaatgaaaaatatagacatggtggttccatgcctgtaatcccagcaactcaggaggctgagatgggagaattacttgaggccaggagttcaaaaccagcctgggcaacagagcaagaaccatctccgcaaaaaaacaaaaaaatactcaccaggcatggtggaggatgcctgtcctcccagtgattccagaggctgaggcaggaggatcctttgacctcaggagttagaggtgcagtgagctaggattgtgcccctgcactccagcccctagatgacagagcaagaccctgtttctaattacaaaaaaaaaaaaaaaatgtagcatgggcatatcagaaatactagggggaaagatcaggcagtaataagtagcaaatctcgccacaagggataaagtacatgacaaagagccagggccacagataacgggcaagcaaaatgcagaaaattcatacactatttccccactgtattatttccagcacgtggaaatattaaagagttcctctaaagtcaggaaccaatccccacaacctacacgcctagggcttaatgtggggcacctggctgaaatggaaagtgggagaaaagcagggaaatttgtgactgtggagatcacattatgactctactgttttgcacatgagacagacaggtaagtatgcatatctgttcagtctatgatccaacttggatattgattttaatctatataaatcaaaaacaactattttcatttcatttgctaatgttcaaccatccgataagcaggaatatttattttctcctttacatgcatgtcactttacagtttatgaagctcttcccgaaaagctttctcatttgacacacatgctagagccacatttatgttcttcctgaagatcaaaacttctctttctccaaatcaactcagcctcacaggaaatgtatttttaatgttgtattgtttctagtttaagtgtcagatgtttctccttcacacacatacggaaccctttgactgaatcttggcacatcgatgaaagacacatgtgcattctagaacaagtgctattcattagtatttgatcctttccccaacttcacactcagaaaagaaaacgtatgacatttctttcattccatttctattgagactaggaatacaagtttcgctgcccgaaactttttcttagggacgtaacagaatgaacgaatacttgcgaacaatgtacaatgtgtttttttcacaggctagatgtacagactagatggtaaaatataatcatatgatagcctacacattggaatttacattataaagaaataattcatttttctaatgattagattcatcgcagaaatttatttattttatttttgaggcagagtcttgctccgtcacccaggctggagtgcagtggcgcaatcttggcttactgcaacctccacctcccgggttcaagtgattctcctgcctcagcatcctaagtagtggggaccacaggtacgtgccaccacactcagctcatttttgtatttttaggagataccaggtctcaccatgttggccaagctggtcttgaactcctggactctagtgatccacccacctccgcttcccaaagtgctgggattgcaggcgtgcccggttcatcacagacatttagtatttcaatcatcaattcttcatatcttcctaaacttaaatgaagatagcacttttttggacaaatgtaaacacaacagcatttttgggacaaatttaaaccaacttttcaaattcagtttgcaaataacactcaaatatagttgggaagtacaactgaaattctgaaattctcttgctgaatgcacattctttacagaagtcaggctagcaaggagttggattggggagtgatcttgaagggtcaccaatcagtagtcagaaaaccgaagcagtggctaaaatagaaacaccagcaagtttattttaaatgaagatacatagttctaaatcaggagtgtattttcttcttcttaaataaagctcatgtatatttgaagtttacaacatgatggtatgggatacatatacgtggtaaaatggttactatagtgaagcaaattatcatacctaccatctggcacgtgtgtgtgtgtgtgtgtgtgtgtgagacggagaaagagagagcgcacgcgtgtgagagagcgagcaaagggcagctacaatctacttaacaaaaatctctaacataattttattaactacagtccacatgctatatgttacatctctagatgtgtttatcttacatatctgctactttgtatcatttgagttacaactccccatccccccaccccatcgtaaccattgttttattttctatctctgtaaatttgacctttctttttcagattccacatataagtgggatcatgcaatatttttctttctatgtctggcttatttcacttagtataatgtcctctagttccacccatattatggcaaatggcagggtctcctttttaaaggctaaacaatattccattgtatgtgtatatatacacattttctttacccattcatcctttgatgggcatttaagttgtttccatatcttggctattacgataaaaatgcaatgaacatgggagtacagatatatttacagggtggtggtttcatctactttgggttgggtatataccagaagaggaactgctgagttgtatggtagttctattttaatttctttaggaacttccatactgttttccacaacggctctaccaatctacattcccactgtgtgctaaagtttccttttctaggagtgtattttctaataggtttttctggttatctaatttcagtgtttctgctcttctgcataaacgacaaatgctcacaataagagaggttgcgatatttgaaaaaaaaaatctaccaatactatttctacatcattaatccctctagcggaccactgagaaggtctcttgatgcctgaggagtcaatttcttggtaaaaatctaaacaacgcaatgcagaccagattcttagaaaagctccaggaatggattaaacctccaaggaagagactccactcacctacaagtgtaggtcactggtcctctaaatagcgtttaagtctcctacaggataaaatccaaggaaagtgtgctgggaccatgttcccttgagccctatctctgcagagattggggttcagcactgcccgtgctctagttccagacttcttcttcagctcatctagacacacagcctcaagatgtgctgaactataccaagttgccaacgtgctatgctctctctcgtctaccctttttctgcctagtacattcctttcccatttctctacttggctatctctctctctctctttaaattttatttatttttatttttattttttattttcttttgaggcagggtcttactctgtcacccaggttggagtgcagtggtgtgatctcagctcagtgcaacctccacctcctgggttcaagcgattctcatgcctcagcctcctgagtagctgggattacaaccagctaatttttgtatttttagtagagaaggttttttgccatgttggccaggctagtctcgaactcctgacctcaagtaacctgcttgcctgggcctcccaaagtgctggaattacaggcataagttaccatacctggcctctacttggctatttctaaccctatgcaatacttcatcacaatgctttcctgagcacaatggttttatgcaactggttcacctaacagaatgtgagctctctaaaaacagtacccgtttcttttatttttgtgttcccagtatctcacacatacaagagatactagataaatgtttgatgactgagcagatggagttatgggtaccagtaaaacaccagggcaattggccgcacagttgatgcactgccctcttgatatatgctatgaacaataaactgagagttccagaatgtactgaagcatctcttgcaactcttgaatacgtattacatgggatgaaacgccggaagcatagcctggctagggtgggttaaactgctacaaaattcagaaacttactttcagtcagttaaggtagggctaggccatccccataagactctctcacagcaaaatgggaaaggccacgaggttggaaagctgaaaatatttattttgaaaagtgcatctgtttttcattccccatcacactcccatatccttttacgttttccggaggaaaacagaaacacatagcatacctgaagcaaaactgaatacaagttcaaatcaaggcaggtaaacaccaggtgagattgcaagcacatacgaatactttcaataccagaaaactgcaagttaaggaaaaccaaagaaacacaaagtaataccgggaagcagatacacattgcaggcaatgaactagaggcaaacacaaagatcaaaggaaacctcacagtgaaataagctgaaatcatcaggatccttttcaccaaaggagctgtgtgtcaaataaaatataagttaagcgaatctaataccaaaaggcagtaaagataatttcaagtaatactattcatgaatcaaaacaaaattgggtagaggttaaataaaagcctctgttcttaaatcaaagtaacacagtagagatgtaaaatgcaaaccctttggtaacttaatacattgaaaagtagattgacaagtaaagaaagtccaaaataatcacataggaaaatgaaaatactgaacaatcaaagtaagatgggaaaatatcatggaaaacacataaccaaaatgatgatgaaaacttaaaggagaaggcttatctgttaatgctcatgaaaaccaaatgtgaacgatgaaaaccttgtacttttgccttaacgaaatgagttgattgttcaaccctttgtcctaacaatcagaacttactcgaaagaaggaacgaaaactgtgactctcataactgcccaagtacttcattcataaagtaaaacagaccactttcagaacataaacacattcttacacatagaaagaaaagaaagaaaaaaagtttatttagggcacttagctgaggaaatgtaaaatatctgcttcttgttctgcgccattcttatgacagatgcaaaatttaagcctaataaggttaaatgacccctttgataacccggaccaagtcgtgagagcactgggacttaagtccaatgtctcgtcctccagttcagggttccggccaccgcaggacaccactgccacacaccccacctcgaccacaagcaggcaaccaaatattaaaggacgtctttctgggacataatacattttatcatgtaaattacagctagacaggagaaataaattctagtgttctataccactgtaggatgactatagttagcaagaatatattatacagtttcaaatagctagaaggatgtttaatgttcccaatacaaagaaatgataaatgttcaagatgatgaatatgctaattaccatgttctgatcactatatggtgtatatatcgaaacatcccttggtacctcatgcatatgtataattattatttatccactgaaacattaaaaaagaaaaatcaatccttaaaatagtccattatagcagtggtactcagaagatgatcttgaaccaaaaaattttaactacattttgtttttaaaagtaaataaatttaaaagaatcaacaacatccagaagaaaaatagcgtttctaaatatttataaacatttcttcatcttacccctaactagtattgttataaaattcttttcaatttctaggatagaatttaaacaaatgcatatgattgactgttactgttaaaagcactaacgattttcatcactccactttttatagagtcaatcagcaccttctcaccagagcccagcagagcacacatttcaaaggggaccctaaatttcaaagccactgagaaatcatggagacttctttccttctgtacgaaaaatatatatatatatatatatatatatgcacacatactgggaatgttttcactttagagtattttttcagctatgctttaatgtcattgaaacatatcaaaacatcataaaaatgtaagaatcttcttgaaagccttccccaagagaattttattttataaaaataattatacttatatatatttatgcatgtggtccttgtttttaaaatattcatttggccattttattccctctccaaatagttgctgaatgcctattctaagagctagagatacaacagtcaacaaaacagccagtacctctgatcttgttgggcatgcagagagagacaaataaataaatcaatatataatatctgaagtggtaccaggtgctatgaaggaaaaaattcagagaaaagggacagatagtcaggaaaggggtgctattttatctctagtagttagagagggtaccatctgagcactggacattcaattcaaaatatgtactcattagcgcacttcaagcagtagcccaaacaattccatacaaagttcccctagcaatcatcctcctgttagttttcttgataagtggatcatttgctttatcaaccctcatcactacacaaaggttcacatgactaaccctaccattatggcctctagctgtaacatgatttatttcaacattagcagaaactaaccaagcaccgttccacttaagagagggtgaatcagaattaatcttgggctccaatgctgaatatgctgcaggcccactgaaacataaagaaaaatggcacttagctaagcaaatatctggggtggcagaagtattccaggctgggggaacagtgtgtgcaaaagccctagggggaagcattcttggaaagtttgagtaaagcaaggggaccagaaatggtgagagtggacagatatacttggaatggcagaaaattagttcagagcagtgaccggggcccaagatcagatatgggtcttgtacgcaatgatgaaaatttgggttatattcagaataaaatgatagaagagtgacatgatgtcaccagggtttcaagaagatcattccagatgtcaggtggagaacagatcagagcaggaggtgggtggaagatggtgtggccagagcagaagcaggcaaaccagtcaggaggcaactatcattgtccaaatgagagatgacagtggctgacataagggtagcaacaatggaggtagggccaagcactcagattctggatatttttgtcatggtccagctgacaagatttgccaatgaactagacatggggtatgagtgaaagacaagcgtcagggatgactccaaagggtttaagtagctggaaagttgtagttgtcacttagcaaactgggaagctcagaaaggagatttctgcagggaagggggaagcagagaggtggtattgaacttataaggtttgatatatgtcactaatcatttgaatactgacatcaggtgccaattggtagaatgtgctttgcttcacttaaattaaattagcatattccaatgtatcctaaaatcttttcaaattcatatggctcttttgtgggcacatgtcacttgtgtttatgttatacaacttattggtacatcttgacttttgcttcataccccaatatctattttttaaaataggcaatgtccctaaagacagagcatcttggcctcaaaacagaggactgagaacaacagaaatttataaatgaccccaaagagtcaactttttggccaggcacagtggctcatgtctgtaatcctggcattttgggaggcggaggcaagtggagcacttgagatctggagttcaagaccagcctggccaacacggtgaaaccccatctctactaaaaatacaaaaattagccaagtgtggtggcgtgcacctgtaatcccagctactcaggaggctgacgcaggagaaccgtttgaacctgggaggcagaggttgcagtgagccaagatcacgttactgcactccaggctgagtgacacagcgagactccgtctcaaaaaaaaaaaaaagtcaactttttcttacaaggcattatttgagtcactgagtcatcgctgctgtccaaaatctccctccatctttgaagaagtatgaaattcctcctttaaaaaaaaatatgattattccctcttacccatccatgtgttactcaaattctagtataaatgcaagaatatttgcctataccttcttccaatgagacattttctcattcaatttggcttaggatagggtcctcttgctagaaataattagaaaagagaaggaatgtgggcttaagaaaaagaggtgattaactaacagcagcaggtttttacagccttggaggagagaatgcaaagagacaagtgacgtgggcatggtctgctgctgcagagggagtagaggcatccaagcagaggccctccgaattcctgatctctacacagattcatttaggacctaaatcatagacttggatggatgatttccaaactgacctcgggtgcggcctcctcttctaaactctaattgtgtgtgtgatgcttccatttgaacatctcaatgttctgccctatccaatgcatgcgtctgtcctatcagaaacatttttctcccaaagccccacagcctcgttaacgtccatcagcattcacatctctactcaaatatcccctccccaaggaaggtttccctgacatcaaggccagatgcagctgcgctgttattgtagccctcattccaccccgtcacaggcctgattctgctcttcattatgtattacttgtttaagtgtctgctaaatgtcaaggtccccccaccagcctctaagccccttacagcggatgcatgtttcttttgctcactgctgtgtgcattgccagatctaagctcttggccagtgcacaaacagcactcagtaaacatttggtgactaaatgaatgaatgatggactgaggaggatagacatgaagtaaagggtcattcttgaaacaaagactctctggtacattgcctttgggagagacatcaattccagtatgctgaactgagtaacattaaataaggttgatcaacattagttcttgtatttgctttgggttttatttatctctttaaatatcaatattattctgcatctacagaaccaggaaggacactgagggcataaatcagtgaccccacgtccaaaaaaagtaatcagaggtcaggtacagtggctcacgcctctgatccccgcacttgggaggctgaggtgggtggatcacttgaggtcaggagttccagaccagcatggacaacattgcgagacccccgtctctataaaaaatacaaaaattagctaggtgtggtggcacacacctgtagacccacctactcaggcggctgaggcacaagaatcacttgaacccaggaggtgaaggctgcagtgagctgagattgtgccactgcactccagcctgggcaacagagcaagactctatcaaaaaagtaatcagaagttactgaacccttcattagcaattcagacagacacaaaaaggggagattttctcatgtatttttacccacaataaaacaaccagtttataatgatttcattagttacacaaaaaggagacctttaataaatttctaccaaaataaggtcagtccagttttacaattcaagatgtatagaatataataaattttattcccattagtgtttcactgtaatgagtgcagaaaaactaattacacaattatacaatctttcgcagcttggtcatttcctcagtcacattactttttacccaccaaggtgttaagttgctcaacctcaaaatttcctacctttgggatttcaacaatatggcctttgagttgaaagggaaattcagtattgcttttgttctcatatgcttcagtcctttccccctccttgctgtactaaaatataactgcaatgaggtgaggaaacattttagtcttaacctttaaaaacagatttataagtaaaattagtttaataccctaaagaaattcattgaagttctaggcttaatccatcagcctggatacagaaaacagaagatacaggaaaagagtgggtatataaaatagtgacaagattattaacaatcaatagtatttctcatttaaaaaaaaaaaaaaaccctctcatatcccaagtattatgcccaatttcttttggcaaggtctaactctgtctgcaagtttatattaatatttaaaatatacacattcattataacctctgaggtaccccaatattactgtaagattgatttttttccttaatggaaatcatataaaaactatgcagaactcaagtttctcctatgactgtgtagtgtgtatatttatcacatataactcctgtgaaacagactcaagcagcaagtctcaagacccttttgtcattacaaatccattgctgcgataatagtgaagtaagacggggggaaaataacatgcaaaaatgcaaattagtagggttttttctttaaaaaaaaaaaaagactattaactttctgaacttaattttaaattctcaaatacagccaggatagatgttcatgcaaaagtgaaaagaattttaaagacactcttgtgacacacttaaaaaatgaatcgattttctttgtaagcagtgaatgtttgatacctccttcatcagacggtcttgttacctcactgcagcatgaaaagctagggtaaatctcggagatttctgacctgtcgtctccgagacctgtaccgaaagtactgctggaatgggatcgagaccagtgtcgcctatagtgactcgccttttctatattggagggaaaatatttacacgtgtgattaagtgactcgaaaaacaaaatcaacaaaaaattacttaaaagcttaacagagaagaaaaaccatctcttagtaaagaataactcaaaatctcagcgctaggcacctattcccaaacttcagcatgcattgcatcaactacatgaataacttaaccatcgttttatgctcttttaagtctcaattttaaaggacgggtaagggataggaaattgacaaggacaaagaaaacattggtaaattaataaatttttgttaattgtaatgcctggttttcaataattcctttaaactatcaccagatatatagtatgtgttgccttttctttatttttagaaaatcaagtgacactgtttggctaactatatgaatgaaagtgactataaaagtactagaattcctgctttgccttgggtattcaattctattcacatcaaaaattaaatatagagtagaaatcaggggttagagcaagatctaaatgacatagctatctattgtttaacataactgcataactgtcagagaaaatttgaaatgtcaaatcaagccatcattcgtaccccaactattcatttttttgcctttaattatgaacttgcaatctaagttaaaagccaactatgcttgccatgtaaactattcattttacattatataaaatgtcaaagaaaattttaaagatacttgaaaatttattttaagacatctatgatgccctgtaaaaaacctttctactgttctatatataattctttaaatctacctttaaaaaattataacaatgtatttcatgaaacaaacctccttttgtctcagcactttagtgcaatccaaataactgtatttgtaaacccagaaataatataaaagcattcttactaataaaaagcttatttaaatgaatctaggacagactaattaagatatattaaaaagttttcttttcataaatgactaattgtatttaaaagtagcatagcatttttttggtttgccaaattctcagctttaaaatttacattacacagtacaatgaacctctacagttcacagtggttcacttttgggacaaaaccacataaatgggatgaactaaaaagtgagtaataccagagagcatatggagacttctagactgaatattgtcttccaggggatcaaggtcgaagatggagccaggatctgtgcgccaaactttgaggtcttttgccaaaaggaagaaatcaacactcatcaagaaggaatttaaaaaaggaaaaaaaaaaaaaaaagccagtacccaaaagagtcaagacaaagtctgcaaaggaatagatataagaagcaaacatgtaacagacaaactcacagtgctgctgacttcagaagagaatgaaaaaatacttgctttcacaagtatctgttaagaaatctttgtaatcagattgaagttgcctgctctattcattgagctgccctatcagaccttgctgaagtacctgtgacccatcacacaacacaggagcacatggggcagctatatgcatcccctcacagcacccctgaatccccagtcactcttgctctccacaggctgaaacaagcaaaatgtttgattatagtttctgattcaggacatgtgagtaattcataggaaacaattgagaagtttatgtttaaaaaacaaaacaaacaaaaaaaaagtccctttctataacagaaatgaatatttaaaatgtggaatggtggcaagcctagttttcattctgagtctgtgagtgcaagctaagtgtatcttagggaatgcatatcttattagatacacttatttaaaaagtgttataagcaaggcacacagcaaggaaatatgatgaatgaaaagagaaataatatcagcttcctgctgtcaatggatccctgccatagtcagtgatcagactgtgcaaaccactttattctcctcttattttaataacttctgaattcaccagtctctccaacaaaagggcatcagatcctaaaataagctgtttacagctgtaccaacaactggaaaagaaaaacctagttatagacatacggcagaaatggggctacagcaaaaacaattaatttgtaaaatggaactggaaatttgcttgtctgtttttaattaatattatgtagtgctgaccatatgccaggcactcttctcatttaacacctaattaatttaagtttcatacatattatcctcattttgtagatgaggaaactgaggcacagagaaattgagtagcttggccaaggttacacagctcgtaagaagtagcagagcctccaacaaaaatagaagcagcacaaattggcttaatctgaattactcagaaaatctctaaacgtgtattttcatgcctgatacagaagctggctcattggaaagtttaatgttggccaattatggaaatttcaatggaaaacagttcttcccaataagaacaaataaactgacttctggattgccaagtaagtaaataacttagagtcatacatcttatattttataaaacaatcataatttcaacctcaatggttttgagtactgaattctgagagcccacggtctagacagtttcatggtttttagcaacgacctcaccatcattcctgacctctgatgtgtgcagggcctggaagtaagctgtacagactttagcagttccaccctaagtgagataaatcagaacccctgcactatcccttaagatagttccatccctttagcacaaagcaatgaaactctaatttggtgtcacattgaatgaaaacatcacaactcatccatccaacttaatgtgatccttttaagtaatcaactcaggcagatcagcaaagctatcaattgcctacaaacatgtttggaatccttcttcagaaaatacttccagagtcactttagtataatcatccaagttacttagtgctgctctgactttagcaccctggttttgtaaagacattaccctgtcaaatttagcttatctctaaatggcctttcactagtaccaaaaaataagctcctacttttgaagatgaagaaaacctaacactgatattactgagtggcatataccaaaaatattctttaagctacgtaactacataattcagaggttaactgctctgaaggagacaatagtcttcagttgttgatacagactgaaaaatcaataatcatccttcctagccctgccttatacttcagtatgatcttttctgatatctcagccaccattcaacaaatatccttctaggatttctcctgactataaggaacagatagcaggaataaaagtttgctctcttaattgcaagactttcagatggctctcaactattccagtccagaaataatatttttaaaatgagctattactattatggagtaccatcagaacgcccatggcgtgtctgtttttgataaaaggacctaaacgcaatatggttatttctgccacttatgcacatgaggtcaacagaacaacacgtcaaccaagcagaaaaacaattattttgtttttctttttaaagaaaaacaaagtaattgttcaaccattgtgatcactcatatctctgctgcttctttgcttaacaaggaggaacattcttttttttattattattatacttgaagttctagggtacatgtgcacaacatgcaggtttgttacatacgtatacatgtgccacgttggtgtgctgcacccttaactcgtcatttacattaggtgtatctcctaatgctatccctcccccctccccccacctcacaacaggccctggtgtgtgatacaaggaggaacattcttaaaattagcaaggtattaaagacagagcttccaataatagaaaagacttgagatgataccaggtgaatgccagaaatcccattccacatcgtacaaaaataatactttacctgcggtccattttaaattgggtaccacaaccaacatgtgatgaggagtcagatgactcaagagggtaattctgaagctagagcaagcatgatcttttcgaccacacacaccggccgacaaacgccgtcagcttaccaacaatgattccaggtctcctgtccatctccacgatgtgagggtggacccctttataggcagcatcgctgaccacctgggtgttcttcctcactctctctgtcacaggatcgtccacgacgggagtaaagcctctcccctttgttttttcaaaatcttcatggtattttacctgaaaaaggaaaaatcatcatactgaattttgcggatagttacctctttcacaacatttttattaaatgacaggtgtacactgcactggctgcgtgcagattgtctacatgtatgtatcttttccaaatactccaaaactaaagtctggaacttcagtttcttagcatcagaaatcaagtgctgatattttcacaaagtttttaatcattatagctcatatctattttaaattatatataaaactatatatatattattaatgagagcttgtaaaaatacatattctcaaatcctggttacttcctaaaatatactaatttaaatataaattaaatttcctatctcttcaacttcagtatgcaataaagtgatatctatttccaggcaatcattcatgaaaatggcattatttaaaatcagtttgaaattttataggtaacaatatataccacttttaatataattacaaaaacttatacttcaaaatatactttttttatgtcctgaaattaggtccaggagatagttgtgtaactgtaaattatactagaaaccattgaattgaacactttaaatgggcaaactttatggtaggtaaattacatctgataatataatttttaaaacacacatttttaaaaacacagctttaaaaacacacttcttttcatatcctttatgacaggcaaacagaccaaattttgtcttagaattaattggaaagaagtctacacaaatatctttcacactatgagtttacagtagtcacgttagaaataaagacacaccagaaaaagtcactgagaaaaatcattttattagactaaatgtttccactgcatttcagtgtgattagaaatgcccctccctcaaaagacaagccaaccacatttccatgctttgttagttatcggattaatagtgaagtaatgccatccgtgcactggatccgcccattccttagcatgttttaagaatgatctggttggaccctaccattgaaatatgattttgtgcttctttaacatgtctcatagcaggtgtatctaaaatcagacttggtctacctttcatctgtttatggtcctgggtatattttacctgcaaagtaaatagtaggcataagacaatgataagaaaacacatgatgtaacatttttaagctttacaaatgagtgaaacatatgcaacatacttgaaattattttccaggtaactatttcagtgaattaaattttgttctagaatagcaacctaaaattttacaatcaaagatctcctccaccgcctactgctaaatgacctaaatctatcaactctaaacaaatgtgtgaatgaccaatagtaactatctatctagtctgtaaacctgcgcaagcccgaggactcgtatctgtaatcacagcactttggaaagctaaggtgggaggatgacttgaggcctgggatttgagactaggctgggcagcacagtgaaaccccccatctctacaggtaaaaattaaaaaaaaaaaaaaattagttgggcgtgtgcctgtagtcccagctacttgagaggttaagacaagacagctgcttgagcccaggagttcaaagctgcaatgagctatgattgtgctattgcattccagcccgggcaacagagactgtgtctcaaacacacacatacacacatacacacacacacacacacacacaactggttatcatatttaagttaaacagagaaaatccaaaactattaaatagaacccaaagttattttgtttctaaatttcccaattttctaccataagagtgttaaaaaatgcatacaagctactctatttctttttatttttttctctgcttagggaataagaaacaatgaggaacaaatttagttgttcttctaagcagccacaacttaaaggtaatttatgttaaatacacacagcatctctggacagaaatgtcactaggaagctgtaaattgcaaagcctaaatgctgattctcaggcaaacagctattcagggtatgctaagaaaagggcctgtgttcttcacaactgcccatcagaacaccgccatttatgaaactgattaggtgtaagatatggataccacttactgtggacctgagggcattatgtacaattcagaattgaagccctgatattcactaagaggaagcacaatattcagataagatactcatgtacaccactggactttggtgagcaactgaattctacgttaactgtatttaaggattcttttctgtaagtctttagtgggggtaatgatccatctcctattttgttttgcagacagcatttaacaatccatgttcaatgaaatatttcaggaaaatgacaattatttaacgcacacatcaaaggctttaccaccttcaaagacacggctaacatatcatgaatcgttgtttaaatgaatataattttaacctaagctttgaatgtaactgttggtcacatctggaaataacaaagagttgcaaaataatgtaaatgtttgcagtggcagcttttggaagtcatctgaaataacacatgtacttattggacacatcacaaatgtttcttgaaaataagttttattttcacaagcaaaggaggaccgcaagtaaataataaaagacacatcctttgtgatagtctaaaatgaagaaaaccacttgccgagctaatattttcttgattcttcttcactctttccatttcaggagttacacttaaagtggtagctcttcccagctgacctctgtaataaacctatcatttcagagaacaaaaaatagaatactatgaatcaattcaacaaagagacttatttatttatttaagacagggtcttgctctgtcacccaggctgaagtgcagtggtacaatctttgctcaccacagcctcgatctcccaggctcaggcaatcctcccacctcagcctcccaggtagctgggattacaggcacctgccaccatgcctggctaatttttgtatttttgtagagattgagttttgccatgttgtccaagctgacctgaaactcctgggctcaagtgatccacccacctcagcctcccaaagtgctgggatgacaatcctgagccacagtgcctggctcacagtatttattttaatgagttagtcagggaagttttgtaggaaactacaaaaaatattttcagaggttgagttgtatttaaaatgctggcatcttaaatcaatctatttcatttcatcccataagagagtacatgtgtccaaatcactgtggatgtactcgaatacataggcataccatccgtaaagctgtaataaatatttaaccacaaaaggaaatgagaataaatgtcttcatggagattacttaaaggtattcaccgtagactggtactacatggtcgtggtttcttaggaattaactgcggcagaatttttgtaaagatgtgtttaaataggtgactgtgggcatcctttaaaaagccagcatgcttctcactggtccactccttgtctaaataaccatgttcctttttgagaataatggagtcacatcaagtatgactctaaatatatgggggaaagatgagcgtctacttctctaaaatatagttgttaggaaaagtatcaatcacctgcctttgcattataaactggtaaaatgactttaaaggtgtgaagaataaaagatttctttgaacgtaatagatttccaagtttcctcttccaaagaacccaatctatatgttaatgactgtaaaagaggactttcttcttgaactgcatccgtgaattatttcaacaacagggaatcggagcaggccacaagttggtgtctaggtaaaaactgccagccccttattaagtgcccccaaaatggtcctgtccaatataacctattcagccatgcacacattatcatttcttcctagactttgcccaaaaatggagtcatgattgtgggaagtggaaagtggggctcggaggaagcgcaagaacaggaacacatgctggtagaaaagggagggaaaatgtttgtttgtagggccaggatgccagaagctacgactgtgggacttgaggagaccatagcacccatcagctagatgacaagatagaagggatacacaacaacctgtcaaaaaaagtcacccaggcccggtggcacacatctgtaatcccagcactttgggaggccaaggtggccggattgcatgagctcaggagtttgagaccagcccaaaccccgtctctacaaaaaatacaaaaattagccaggtgtggcagcatgtgcctgtaatcccagctgcttgggaggttgagctgggaggatcacttgaacccagaaggcaaaggttgcagtgagtcaagattgtgccactgcattccagtctgggtgacagagcaagaccctgtctcaaaaaaacaaaaagaaaaaagtcatcctgatgagtcactgggaaccctgaggtggggaacacctgactgtacccacaataccaaagtccccgaaatctttcaaataagttgttagtcaaatgagaacaggacatcagctcaaggttatgaaaattctataaatacaatcccttcattcacacgtggacaatgcatttgatagtgtaagaaaaaagttactaagatgatcacacattgctgatgtttttctggttttcttttgccctcttcagctctggtggatcagaaattgcagttccccgttgaagttctcccttatattttacctaagaaggataaataagaactttaacagatagcacaatgggctccactgaaataccacaaaggacaaggctcaaaattagcaccatctttttacacatttttttccacagttgattacatcaaccttcacgcttacatatacgcccacattccgatgggtctgatttagcaagcacaagttgttgctggtactgtttaaatatgtcttcaataaatgctttcctcttcaatatcaaaattaaccataaattccacaaataaaagtaatggaatcataaggcaacatgctttaaaagaaacgccagaatgaagtcattacaagagaactcttgtgaagtccattccctgtcaccctagaaggctttttactgtcttctgaccgtggggcttctcccttcaatagaagctaaagctctctgactcctaccacctcccagggatattataaggataaacagtgttgagcctcattatctccacccaggagaacctactcttacattttgaagtctttcaaaggtacttgttttggaaaaagaaggcttttgtttgtattggtgaaagttcaacaatatgttccaatctcagctctgcctttactagctgggtgggggggctgggggtgggaggccagcatgtcctctgacctccccaagactcagtttcccacatctaccaaccagagaaacaaacagtgctgacctcatgggtttacatagaacattagtacagggcccagcacagagtagcgctgccttgttaactatttttgctttattcacaacagactattgaatgactgaaaaatgttttccatttataaggctctttgacttgatactatgtcttagaatgccagtcaagccaggtcttcttttgccctgttccaatatatatatatttttcttttcatattgacatcagatccagtattctccattaactgcatttttttaaagagatttaccaactgaactatgaggtccttgaggatagaaagtgggtcttacccatctttgtgtctgggtgaccaggacaatgcccagtacatttgggtacttaatgaagatctcttgaataagcaaacacagctaaggtacagcaacacagtcccaaatttcctggacacgcagttcatgcccttcaacaaggaaatgtgaaaaggaacatccaaaaatgcagagggtgtaaaacttttcctttttaaatttttagatagttttattaaatctggagatattccgtttatcatcatcgttattattgcagttgttaaattttacaaaagaattaatgctgcatgtacatattcactttttcatgttataatgatatgattcatccatataattgcatgttgctcaaattcattttcttttaaaacttttaagttcagcggtacatgtgcaggtttgttacacaggtgaacttgtgttatgggagtttgttgtacagatgacttcatcaccccggcattaagcccagtactcaacagttacttttccggatcctctccctcctcccatcctctcccgtccaacaggctccggtgtctgttattcccctctatgtgtccatgtattctcatcatttagctctcattattatgcagtatttggttttacgttcctgtgttagtttgctaaggataatggccttccaaagggcatatttttaaataaaaatatgttatgtttgagaaaatataaaaggaaacagaaacgacttgccgcactcagctgctcctggtttcgcctcactctctctatctccggggtcatgcttaccggagtggccttgtagttttgctctttatactggagctgagagacaaggtgcaagacagtttgagattatgggaaataaatacgtcccaaaacattgcaacagattttttttaaatgtcacatggctacagaacattcattaataagatcatcatcaggatttcatagtgaaatatgtattgcttatagattttatcttcttggcgatgccagtcttttccttgtcaagtggttttgttgttgttgttgttgttttatttttgagacaaggtcttgctccgttgtccaggctggagtgcagtggcgtcatcacagctcactgcagcctcaacctcccaagctccagcgatcctcccgactcggcctcccaaagtgctgggattacaggtgtgagccaccacacccaacccttatcaaatgttttaagtcacactttttgttgttttccttcagattatattatttattggtggcctctctgagtttgatcttatcagtaataatgaataatcccctcatcagtaagaatgaattctatgaattcatttcttcatagcactaaagcaacatttatcaaattgccattttatatttaaaaataataattctacattcttatcattgggaaggagagtaacaaaatcctgtacctgaactttagtgatagactattactgtataaagaaaccttgaacttcaaaggttcttctctatgccgttctaacattggaagccccatctctgacctagcattatagaaattttcctgacttaatgcacagaggtgtttttcttagctggggatctaactccattgtttgtggtcatctttcccaacaattccacaacacctcccaaaataaatgagcatcaatagagaaaatcagaatggcaaatgaacttttggcagacaaaagtagagctggaggttaagatctcattagaagaaacttcacagggacagttttagtgtctttttagactttaaagctcaggttagggaattttcttttacaagaaatccccacaagacctgcagggcctgctgatgaaacagacttgaggtcgggtttggtggctcacgcctgtaatcctaacagtttggaaggccgaggcaggtggatcaactgaggtcatgagttcgagaccagcctgaccaacatggtgaaacctcatctctactaaatatacaaaatgagccaggcatggtggtttgcatctgtaatcccagctactcaggaggctgaggcaggagaattgcttgaacccaggaggtagaggttgcagtgaactgagatcacgccactgcactccagcctgggtgacagagtaagactctatctcaaaaaacaaaacaaaaataaaaaagaaagaaagaaaagaaaaagaaatagacttaagatgcatactcttagtagtgaacatgagagtgaagggaagttgaataagtttaaaaaataaatgaaaaggggtaaggttcctctggcctctttcctcgatatgtaactttctgtgtgccatggtatgtagtttgagatgttacgcagattcttgtgaccgggtgattgagctaaagggaggaatgtttcagtttaatctgtatcaagcttgaaagaaatcactctggctaaagctcaaaggggttacatctgaatagtaaattcacattattgacaaagagaaactcttactgccaatttctagtggatgtaagtttgggtgcataagtttgatagaatcttcacatcttgtattcatcccttcacaaacatgctgtgtgcttcacaagcaatatctcttcaatactcttatccttgctttatatagaggaaatttaggtttcaagaggtgaatggcttacaacaattatacaacaagtaagatctggagttaggatcaaatcatccaacagtccaggatccagggttcatgttcttttccaccacttgagtgttatccaaatttcccaaatttctgccatttgcatgcccctttctctatgtcataccagataaatactacaaataacacctacaatgttatactttttcattaaattaattcactgtttattttcaaataaagttatttctaagagattgttatatttctaccatcaattgaaaactagtcacccttcttttggaagaaggtaaacattagaacaatttaatcacgaagtcaactgctcttaaacattaagattgtcagtaagccacataatatctaccggaatgccataatggtatatgaaccacactttagagacactgtgggaatccatactacctttttgtgatctgtatctcaacttccctctccagcatacgctcctgccatctttcaccccaagtactcatcacactaaaccctcttcttgaatcctggaacaagccttggatcttgaacatatttggtttgctctgccaggaatgcctttcctcacaaaactcagctctaaacctttattaccttttcaagatctaactccaacgttaccccttccccaaggctctttgtctctgccactgcatagccgtccttctgcgtttgcacagcactttgcaagaggcattattacttatgattaaatgagatattgcaatgtaaagtacccaaaatgcatagtaagcacccaacaaataacagttattgtaatggaacttaaacagtgaacatagctatatactcctatctctgtttctcctacaaaccttgaggatgcccacgacccctaatctcagggcatacctctcatctttaaaatcccccaagaacaagaacagagaagacattcaataacacatttcatgtttagttttgtcacttgttttgttttgtagactaatatatatatatgttatctatctatctatctataggtctatctatagatagatatctatacctattttcataaatatatatattcatagatatctatacctattttcagaaataggtatagataaaagaaatagaaaatgttcttttttgtgatttgttttgctttgtagactaatatatagatagtccatatgtctatatagataggtagtagtctaactagatatagaaagactatatagagatatatacagactatctaatatagactatatataaactaatatagactatatagagatatacagactatctaatataggctatatatagatatatagagactatagatatatagatatatagagactatagatacgtatatatgtctacaaaacaaaataaatgacaaaacaaaaaagaaaatatcaatatatgtttctgaaaataggtttcattcctttttaattattatagattcaaaggtacaagaacagttgtgttacatagacatattgcatagtggcgatgtctgggcttttagtgtaaccattaccctagatagtgtacattgtacccaacaatatttcacctctcatcctgctctcaccctcctaccttttggagtctccaatgtctatgattccactctgtatgtctgaataatatgtgtctttaataaataaatgctgacacaaggcattaggctaggtgtcatggagggcatacagatgtgtaaaatgctagctccacttttaaggaaccgatcctctcgcaatgaggttcattgtgatggcatttgacctgtacaggttttatgctgtcattacgtgttgatatacaataaaatttttaaaaaatacttaagaaatatgatcacattgctgatgttcttctggttttctttaactctctttagttctggaggatcagaaatggctgttgcatgtttaatctcttctttgtatttcacctgcataatttataagaatataacgttaactttattctatgcaaggctttaaaatattgagaattcttcaattgtaactattgcataattgaattttattaattccaacattacttttccttcactggggacataattcttaattttatatgatgctttcaggattccttattcctaaggtacaaataaatccgtatctattcacttattcatcactataggagttttttaagtaaaataagcaaatgttgcttataaaaataaattttatcattaggcagatgcaggaaaaaaaccttgtacattatcgtaaataaaatgattattttctatccaaaaatcagtttctattaatatggtaattaaaatttaacaagtatttaaaggcaaaagtcaaattgatttagccacagagtctggggagcactgcttgtctgactgagagcacataaataataaggaaataaataaggaaataaggaattccttatagaataaggaaaaaaataaagtgagcacaataaaagaagagaaaaagggagatggaaggaaatgtactaaaagcatagaccactgggtcctgcatcagtataaggaaggtcagcgccaggaagtcagagatgtctgctatccacacaatcacattaggaaaagctcacctttatcctggcttctacttcactcaaaatctcccccatcacatatatttagaggaagatcaatcaggcaaatggtaatacaagcatacagttatgcacgggacaagaaagagttctttgaactcataaaatgattagtgatactatcaattcaggtggtattttaatatgtctaaaattcatggaagataattcaaattcaatcttccttgaatgaaaaggatacatatatatgtaagtatatgaaagcataggctcaacttaagaggccgtgttgaaatttagtaaatatctaaatctacatgaaacatgtttcagaaatcacctggtaatgtttaaaatgattaagggtgaaaaccatgcagactgtcataaagaaacagtacctaaatatctcagatatcatctatgtcttagtatctgtggatttcatgtaagtaacaatgccaatattagtccagacccaaaacagttaaattggaagttcactgagacaggctacctctaaataaaattcaaaaatagttcttaagacagagagctaacagctaaaaggcttgtactctggaggtggaaaatgtcgagatctttaaatgttagagaatcatatcttggtttgacagatctagctaatcttaaaagggcaactttccatttgaatactaagcaggagtttatggcccaacctcatgcagatacagaactatgcatttattgtttgctagaagaggctgtgggatgctaagagaagaaatgatatactgtaatactctgggattttcctcaggtaagaagcttaacatgattaaagatgaacacttttgtttttcaaagggactctaatcaaaatggcacagttatttcactgtagtctatagaattgcacactacagaatatttataatattaaaccacagtacatcgatgggtgcattttaaatattatcattggaaagagaagcaatgaatattttatacttctctcccaacctaattcatctaccaggctaacacaggctctcaccatgaaagatcagaagaacacattcatccactctcatccacaccttaagcctaggtcctccttacactttattcaagagacagctccatggtgctacagaggttttattgcactcatattctgtagactttttatgcttttattttgaagtatactttactattgcattctcttacctctcctacactttcttcacaaacgctgacccacactgatattctctggatgctgcataatgaccaagtgacccacagatgagtctaatcaaggcaattctgcttggattacttaaagggaaggtgctctttccaaggataaggtgaaaagataagtcagagtaagggatttaaagaacgaatcctttttacttcctcaagaaactaaatgtaacggaaaggcacagtagcttatgcctgtaatcccagcactttgggaggctgaagcgggaggatcacttgaggtcaggtgtttgagaccagcctggccgacatggtgaaaccccatctctactaaaaataaaaacaataaaaataaatggccaggtgtggtggtgtgtgcctgtaatcccagctactcgggaggctgagacagaagaatcacttgaatctgggaggcagttgcggtgagctgagattacgccactgcactccagcctaggcaacaaagcaagactctgtctcaaaaaaaaaaaagaaactcaatgtactaaatatacatgggagaatatcaaattggtaaggagagcaattatccacagcaaatgtcaaacactcaatggaaaaaacaatttatccgtaatattaagcaccttaatgttagaaggacccttccaacagaagaggacccctccccccagtctaaaggttactggaagctaagttatttcacaatttatagtgaagatgtgtgatttgttttcgtttctgctggaagaagcagaaggtaaaacaggctggaaagaagaaatgggcagaagcgtgtctgataaaaagcttagagatgtgactgacatcggttaaaaatgaactggtactatttgccttttcaaatctaatccttcacttaagctgccaaataaatgttctggggcctttaatcattgtatcagggaaaaatttctttcttccaacttgtggagaggtactgaaatgtatcctttctctgcaaaatttaatagagttaaaattctcttcaaagagatgaaatctaaccctaggtttcattaaaatgacctagctcttcttcattgtgatatatcaaaatgaaacactgcttcagagtcaaggggaacaaggatacagtttttgttctgaaagttagatctttgatatatgatgaaatagcatttcaataaagtgaagaataaaaggaaaaaagccatcagttgagtaaagaactaaaaacatttgtctatagttttggtttgcttttagaaaagataattaatgctgtagagaacttactgaactaatattctgctgatttttcttcactcgttcgatctctgggctatctttcactgcagtgccagctcccacttctttcttataaaatacctttattataagaaaaggaaaagaataactaagcttgtcagaattcaagtcctagatccgcttcttagaaagacaatttctcaggttttataataatatgaatactgcatctatttatgagtgccggaattataggaacaaattaaataatccattcagataatccatgaaaactttggttttatatcccataatctcacaaataaccctctcctgctctaggtctagaccactaccatggctgactgcagattatttgctttaagaatacacattggcaaaccagagttcctttcttcaaatataaatatatgtcccatgtgtatttgagaaaaagcagatattacaaaagcccattaagccgttatcactgaattcaaaaagaaaatgacattttaggcaacttctatgctccaaacacaaggatgcccacattctcttccaagaaaatgttagctcatcatcaatatcaatgttaatttcaagtctatcttcttcatcttccacttatttgttaaccctctcccatgtgtctccacccctactaacgtctacccttccaaacccaaagcagaacaaaaacacaagagtatttatgagtgccctcgttatgagtactctgcagaaaaacagagtaattataagaaaggtaaatgaggatagaattactccctttcttgacatttggtaatccagtggcccccgcgtgggtgggagagcacggtaggagagatgttttcctccaaaggctagaactacagaacactatagaatcacacagcctcttttcctcatccttccatcaagactttcccatttctcagtacagcctggccatccctgtggagacccagcagacatctgaccagcttactctgagagctggcgcttgccaactaattaggaggtaggaaatattccagaagtcctcacacttactagaatttatattttgatgagatgcttccttaactattaatgactgagctaattctatgttaaaatattagttgtatggtcaatttttacaattttagaacagaagtcaagtttatacatttattaatggactcagcctcttaattaatagtgctgatgcactatttacaataggaaagacatggaatcaacctgaatgcccatcaatgatagactggataaagaaaatgtggtacatatacaccacagaataccatgcagtcataaaaaagaatgagatcatggcctttgcagggacatggatggagctagatgccattatacttagcaaactaatgcaggaacagaaaaccaaataccgcattttctcacttataagtgggagctaaatgatgagaacacatggacacacagaggcgaacaacacacacaggggcctatcagagggtgaagaaggaggggagggagaggatcagaaaaaataactaatgggtactaggcttaacacctgcgtgacaaaataatcgtacaacaaacccctatgacacaagtttacctatgtaaaaacctgcacaggtacccccaaacttaaaataaaagttaaaaaaaaaagtgctgatgcaattcctcttcctcaaaataaaaatatagaagtttagaaatttattaagaatgagtaaatggttagacatattatcagtaaaaacaatcaataaccaggaataaaatcacttcatatgactattttcaccttcaaagtaaaatctgtgtagaagacagacttctttcctgagttaaattttaaaatttagttaataactgtcatttataccgaagaggaaattttgaatttgtaattccaaaaaaataatgaaaaatgataatttgtaaaaattatcagtattcttattattttaaagaaataaagataatacacttgacagaaaattcaactaagacagcagaaaacatcagacaatgaggaaaaaagaccatttcttacaaaacaaaatttcaaggtggcaacttaaaagaagtaatggctactcaccgcactaatgttttgttgagttgtcttaattctctgaatttcaggagtatctgctatggtagaatagttagaaagcatcttctctgcttcatctttatactttctctaaaaacataaacagttaatataaatctgaaactatgtgtgtgcgcacatgtgagagggagggagggaggcaggaaaggaggaagggagagagagagagtaaaaaactgtttttactgacttacactcccagagagagagagagagaggtggagagacagagatagaatgataccattcttcgatctctaccatacgacatggcttctagatttacgctttgcttcctacttcatgtgaagatagatttgattaagggaaagttaacagtattttgaagttgagattaaaatcttaattttctctccactaaatgagctactatgagctctaatacaacccaggcaatatcttatcctagtaccagcacttacattgtacttactatgtaatgggtattgttctaaatacttaacacacactaactcatttaatcaacctgacaagcagatactattattatttccatcttacagatggagaaactgaagtactagatagtaagtatcagagcctcaacttaaaaccaggctctctgattccaaaatcagtgaagttaattattctggcaaactacttaagaaaatgtggcacatatacaccatggaatactatgcagccataaaaaatgatgagttcatgtcctttgtagggacatggatgaaattggaaatcatcattctcagtaaactattgcaagaacaaaaaaccaaacactgcatattctcactcataggtgggaattgaacaatgagaacacatggacacaggaaggggaacatcacactctggggactgttgtggggtagggggaggggggagggatagcattaggagatatacctaatgctagatgacgagttagtgggtgcagcgcaccagcatagcacatgtatacatatgtaactaacctgcacattgtacacatgtaccctgaaacttaaagtataataataataaaattaaaaaaaaagaaaggtaactactattcatgttgaaatgcaccaggcttcattacaccctcgtaagtatcccaattgtatttcagtgattaaaatcccttaaaattagatatattctcacaccacactaaaaaaaaatctatgctgttgagttaatgcaggaaatctgacagctcaggcaccttcactctcaatacttttactttcaggtgtatatatcatggttgtaatactatatttacatgattattagatttatctgtagctttccaagagcaaagccatgtctagttttgcctgcaaatgggtgctcaggaggtatttacctactgaaggaatgaatttggcattcttgagagagtaagtaactcttctccactgactcaaatgtctatttgttgtttaatgcattgacttaggattttagttaagctgatatggccaagccaatgtctccaagttcacgaacactgagaacagaacacacacttcaggatcatcccagcggctgtgtcggctgcggaggctgagaggcacacaagtcctctgacatttgactctgccatcttgatactacccttttgaactagtggatggttaatgtccttgcttatgtcttaatcagaattttaacaaatttcaccaaatgttgttacacaatcctttctgcataaactccattaatcaaattaaatgctatggtcaattttaaataaccattttcatttttttcattccttctatttttttccattgggagtcattcttttttagtaaatgttacagcaaagatattatttgctaatgaatgtttttgcccaagtcagattttataaataaattcttcttccataaatttttgtggtcactacttctcccacatccagctttgtttacagaatatgggacaagtatatttgacaaatctaaattttaccaagaaaacctcactgttcccttaatttttacctaacactaaacttcactttataccttgtgcagctttagccactgttagctttatttggaactattttaatattaatattcattatgaaatggttaaaagacaaaacgtttgtaatttatttttctgtagtattagcaaaagcatttgagccaagtgtccaatagggtcaaaaaaaaaaaaagaaagaaagaaaaggttaaaatatccttgggctgggcacaatggctcatgcccactgaggcaggaagataagcttgagcccaggagtttgaggctgcagcaagctatgatggtgccactgcattccagcctgggtgaaagagtgagacctccatctctaaaatttaaaaaaaaaaaaaaaaaaaaaaaggtttaatgtccttggactcaaaacaaggagccccgacagagaggctgtagctctccataatgtctgttgcattgaatctatgactgttgtcctattaattagtacggttaatcaagtttggccaatggtttcttagtgaaagagtacactagctctgaatgcaatgccctcagaaagatatcattcatagagacatacaaagcacatggcaacatgacattggaatacacgattctgagcatcttcattcatgaccaacctggctatagatttcagatgtcctcttggctcgaaggatatctgggatatccatgctcacttgcattcctttccctttaatttcattttctaagtccttcttgtattgtttctaaaagaacagaaaataatcttagagctttgcttaagctttaatagcgatgttgaaatttacatgtttgaatctcaaagccacccatgtggaaagaaaacttatgctctttccagctatgattcacggcatttattttaaactttgtatcttgctgctgtcttacctggctggccatctcggatgctttcttagctctctggacatcaagagtgtctgtgctcacctgcatccctttccctttaatttcagtctccagatctcttttatagtctttctgcagaaaatgaaacatacagttagtgctctccaatcatttgagaaactgctcaaaaatcgagatgtcattttgacattaagaccatgtcttttggaatgaagttgaatccttatttcttttatttctatagaataatagagtttttacttgtggtaggaatacgacttagtataacttattcaccagtaatcagaacaatttttttcagctaatctgaattaagaagaagaaaaaacacagctagccaaggggaaaatttaacatttcaatatgataaacttgatatattattgggtcatatatggcttagttaagtgtcagtcaagagtgattgtaaaattgctgtttttcactctgtagtgaataagtgttggttgcttctctggaatccaccccttttttccccttcattggctccctaatttgccactagacaactcaatgttcccactcctaaaccatccagcttcggtgagactggctcaaatctctggacttagctgggcttaaataaatcattattcccttcactggctctctgatttgccactggacaagtcaatgttccccactcctaaaccatccagaaactggcccaagtctctgggatctgctggactcaataaatcattataccccatcacccacactgcagaattggttctgggatgcatgcatctttttttccatataagagctgctggaagcctctttgcaaacaagaatgtctacctaagaactgcaagctgaaactatatctcattatttgagtcctagatcaagccgtgcctaggaatttctctactattcaatcataagaacaacaaataagttatctctgttttttttttaagccagtgggaaatggattaccaattgcttacaagatagtcataattacatagacacacatgtctttagggacttctgtcacatttgaaaactgattataaaattcagaaagctgtacatatataaatttgctttttctatatgtatattattcttcaaagaaaaatgttattaaaaaaaactattaactatagccaattaaatttgctttaaaacaattatttcttattatgctgacacactccagatttgtagattctctgctgcaaagtaaatgttgatttgcttattaggagatcctcaaatttaggtaagtggtaaacaaaaatctcagtcttggagtattttgcctcctatcttccactcataatccttcctgtttttactgacttacactcccagtatcacttttctaaataaaagtttacataattatgtttaactttcaaaatattaatattcaattattactatgtctacaaaaagcactctgttttagtcagcctgttcaaagccccaaaatgaaatgtttcatttgaaggccaacaaatatgatgaaactgaggcactgataacagacagccaccaaggtctgatggtaaaaggatgtaacaattttttaatatgaactttcaaatgtaaatgtgttctaaagcacatagactacattagacaccctttgcatcagttatttgttgtctgcataacaaaacacaccaaaacttagcaggtttaaaacaacatggcggcatctacattccaagagggcaaaccctaatgcagaagtgtgtttatagtctgagtcacatttgctgatgtctcattggctaaagaaagtcacatggtcaagcccagagatatgggaaggcttgactcttgagggtcatttgtgtcacaataagatccattgactttatttgaaaaataaacttttgatattaaaaataaactatggcaaagtcccgaacattggttgaaaatgatctgagcctgtcatttaggcaaaatgggacatgactatgattatatgcaaatgagatttttattattattatttggggggtttttattgactaagattctcagcctgagagtggagacttcaccagagccacgtgaatcaatttacactggatgtgactggaaaccattaaagaattgcatgtgaggagagtaacaaaatttcatttaattgcctcaaggattcttctcctgctgggttaagaatgtctactaggaccctggaggcagagcttgcagtgagccgagattgcaccactgcactccagcctgggcgacagagcgagactccgtctcaaaaaaaaaaaaaaagaaaaaaagaatgtctactaggaaggcaataatagcagaattctggttaggaagctatggcaatgatctagaggatagagatagtggcttaggactagggtggcaagaaagatggatttagaccaccactatgggggtggcatcaataaagtatgctgatgacaggaatcaaagtgacttctatgctttggttggcgccatttgaagattggggaaagctaacctaggggaaaattagggattctagttttggcctgtaacgttgagatcccattatacatttcccttgcagacaacaaaagataaatggtcacatattcacatccatgttacagaacacttaatttttctataagaatgaggtagacctatatgaaggaacatggaaaaaaatccttaatataaagtgagaaaacaatcaaccacttaaatggggtctgaccccatttaagatttttttaagtcgctgtgtgtacatgtgtatgtttatctatataaacacaaaatagatttggaaggttccataacaaacttataacaatgactatctctcaggacgagaacagaagtaggaaagggataaagcaggttttcaagttcctcatgctcctggccgtccacccctggccaccacttcaaaatggaacacttattgatcaggaaacctataccatctccacttcctttgtcttattcaatcatggcaatcccatttccctggccagtgcctaactctggggatgtcagtcattttcaaaacaacagtaacttccctagcagctaagcagctacctctggccttccagatttcctgtaaggtgtcagtcctgagtcagctcttcctaagtgcaaagatcacacaacaggtctcaggatactccactgaagcccccacctaaccaaccttgagataagtgaacaggaccccttcacctgcaccccgattttttcttcacatacactttttataaaatcatcacatcccaaagcttctttactccagtgatccttttatattctcagattttctggggaagttcaagaggtgtagagaaagttctagggtatttcctttgaaaaatatgcatatggtctgactcctacaaccttgtgatgtgatacccagcctgtcacagaatttaagacaaaacttctaaatcaatatcctgtatcccatgaagaaaaaactggtgttatcagatgaatgaacatggtcgttcaggttatatcagacctccatccaaaatgctgactgtgtagaaatttcatgcgtgctgatcatgtcaacaaaggctattttaagaacatgcaatcagacaggaatgactattgttctcatgtaaagtgtccatatatgaagttctgctcagaaatttggaaatacagatatgccaagcagcacatgatccattaaaaaataccatgaaaacatttatcatagcctagattaccattaaatctgttgtattctgaaataaggtgtgcaggggagtgcatgtgtgcatgtgtgtctgttcaattaaaatgccttccaccaagctttcttgatatattggaaggatatgagcaaagcaaaaactgtaatttttcaaactggcataatgcttcggaatagtctccattccaaactgttaaaccagctgcaatgctttgagaaattccatatagtaatcaagttgctaatacgatttgttaggttccaaaatatgagtcttaaggcctgcatcacgcaccctactaacctcactcgctatctctgcagccttcttggcatgctgcatttcaagggtgtcagtgccagcttgcattcctttccctttaattattgactccaggtctttcttgtattctttctgcaaaagacaacattttacaacattcaaacactcagtgggcaaacatgcatctgcagtcaatgatactaaaaaaaaaatagttagacatattttacaaaagaggtaacaaagctccttgagtactatgaatgatcactcacaactaacttctgaactgcttagaatgataatctcattctcactgaagaagggcatgcaaagctccaaaaatgtttagtatacaaaggcaattgccatgtgaaaatcttcactgacaattttctttggggctggaggatagggaggtgggtgtaaatgagctgctgttgtacaaaacagatgaacttagaagccagagcattcaccagctgtatgacactgagaattcttaacctttccagtttactcatctgcaaaatgaaggtagtaatgcaagcatacctcatttttattgtgctttgtagatattgcatttttttttacaaactgaaggtttgtggcaactctgcttgtcaagcaagcctatcggtgctatttttccaacagtatgtgcttacatggtgtctcggtgtcacattttggtaatacaatatttcaaactgttatggtgctttgtgatcagtgatttttttgttttgacagagtcttgctctctcgcgcaggctggagtgcagtggcgtgatctcggctcactgcaacttgtgcctcctgggttcaagcgattctccagcctcagcctcccgaatagctgggactacaggcatgcgccaccacatccagctaatttttgtatttttagtagagaccaggtttcaccacgttggccaggccggtcacgaactcctgacctcaggtgatccacccacctcggcctcccaaaatgctgggattacaggtgtgagccaccgcatctggccaatcagtgatctttgatgttactattgagacagacagataggagggggtcactggcaaaactccaactggcctgtgcactgggaagagcatgcgctggggtggagccacagaagttccggcagtttgcaagagggaggagcctggcctctcctattcctgtgtggaacctgggattcaaactgtgaggtgggaagcactctagcagggactctggccttgcagagagtccctgtttcccccttttcttcctttacacccaataaaactctgctttactcacccttcaaactctctgcaagcctaaattttcatggccatgggacaaggaccctgtctttagctgaaccaagaagaagtcctgcaacactattgtaattgttgggagatgccaccaaatgcacccctataagtcagtgaacttaatcgagaaatgttgtgtgtgttctggctgctccactgatcagccgttcctctatctctttccctctctttgggcttccctattccctaagtcaaaacaatattgaaattgggccgattagtaaccctacaatggcccctagatggtcaagtaaacagaagagacgtgctttaagtcaaaagctagaaatgactgagcttagtgaggaaaggatgtcaaaagccaacacaggcccaaagctaggactcttgtgccaaacagttattcgagttgtgaatgccaaggaaaagttcttgaaggaaattaacagtgctaccccagtgaacacatgaattataagaatgtgaaacaaccctattgctgatatagagaaagttttagtggtctgaataggtcaaaccagacaaaacattccagacacaacatccccttaaaccaaacctaatccagaacaaggccctaaccctcctcatttctgtgaaggctgagagaggtgaagaagctgcacaagaaaagttggaaactagcagaggttggttcatgaggtttaaggaaagaagccatctccatcatatgaaagtgcaaggtgaagcagcaagtgctgatggagaagccacagcaagtcacccagaagatctagctaagataattaatgaaggtagctacactaaacaacagatttttgatgcagacaaaccagccttctattggaaaaagatgccatctaggacttccatagctagtgaggagaagtcaatgtctgcttcaattcttcaaaggacaagctgactcttattagggtctaacacagctgctgactttaagttgcagccaatgctcatttaccattctggaaatcctagggtctttaagaattatgctaaatctactctgcctatgctttataaatggaataacaaagcctggatgacagcacatttgtttaaagtatggtttactgaatatttgaagcccactgccaaaacctaatgttcataaaagaaagactccttgaaaatattaatgttcagttacaatgcacctggtcaccaaacagttctgatagaaatgtataaggatattcatgttttcgagcctgctactcaacatccattctgcagcccatggatcaaggaaaatttttactttcaaggcttattatttaagaaatacatttcatagggctatacctgtcatagatggtgattcctctgatgaatctgggcaaagtaaattgaaaaccttctgaaaaagattcaccactctacatgccattaagaagattagtgattcatgagagaagtacaaaatatcaacattaatagaagtttggaagaagttgatttcaactctcatggatgactttgaggggttcaagacttcagtggaggaagcaactgcagatgcagtggaaatagcaagagaactagaattagaagtggaacttgaaaatgtgactgaactgctgccatctcataatcaaacttgaatggataaggagttgcttccaatggacaagcaaagaatgtggtttctgaagatcaaatccttgtgaagatgctgtgatcattattgaaataacaacaaaagatttaggatactacaaaaactttgtcattaaagcagcaatgggtttgagaggttggtctctaatcttgaaagttctactgtgggtaaaatatatcaacaacatcacatgctacagagaaatctttcatgagaggaagaggcaattaatgtggcaaacttcattgtcatcttattttaaggaatggccacagtcaacccaaccttcagcagccaccatcctgatcagtcggcagccatcaatatagagacaagaccctccgccagtgaaaagattaccacttgctgaaggatcagatgatcattagcactattataaataaagtactttaaattaagatatggatgtattttgaacataagcctattgcatacttcttagactacagtatggtataaacataacatgtatatgtatggagaaaccaaaaagttcatgcgaatcactttattgtgatatttgctttattagagtggtctggaaccgaacccatagtatctccacagtgtgtctgtacctccatgtaggatccattgtgaggatcaatgacagtgcatagcacagaggagatgatcaacacctgacaccttcttccagtttttcaatcttattctcctaggccggttcttccttctcctaataaggcctaattaatgctgctcctgccgccatcctgccattcaactgcatctgtctgtactttgccattgagagaataaaacaacttttacacatgctactgacaagtaattacaagacaatctctgcatgtggattggacatgtcacggcaacagaagaatttgcagaaaatgactaatgtagggttaatgtgatgacaatgttagccacagacctcaccaggggcacgtgttgtttatggctgaccagcatccattcctcctccttctggcaaaaagctccatgatttccttttgggaaatgacctctaagttctctcaatccatacccttgggaaggattgatttccatcacctccctagtccccacatatatttttaattctactaaagtgccttttaaatgtttcctttatttaaagaatgtgaatatagctgagattaaggtcatgttttaaacacataaaaatttagaatgttttctataagacactgttaaactacctcaacaaatgggtgaccatgagaggataatcagcacattctactcccccaatcccagacacaatgattatgccaggtgtaagcacaggatagagattaatccaaggagattcaaacctaagactttgattggaactataaaaagggatgttcacttcccattgggattactggccatagatatgagttatccttttattaagtgggttcattgcatggagacagccttccagaagcaaagccaatagtgaagataacagaaccaagagatggaggaagagagacatcatctgaattctaccttgacagtaactcaatcttcggattttctattccatgagtgaagacatctcctttgatgcctaccctagtttgagttgggtttctgtcatttgtaacctaagagtcaccatcaccatcgtcatcgctatcatcatcatcattatcatcagagtttcaaaatatggggacaaggctttaagctctttcactgctaaattcagccaaagtctcttaaaagcacagtgacaccatatgacccaaagtaatgacataatacaaggattacaggactgaaaacacttcagagacatttcagttctccttataaagtgcatgaaaagtgagcagaaaccactttcatttgataaagaggctgaataaggttcaaacagcagcccagggcaagactgggagagtcagttgggttatgagtggcaaagcatgtgaactttctacctgcagttactgatggaccataataacataccttcccaatcatctgccttttacctgcttaaaagatgaagttaaatctcattaaactattttcgtttattatatggattttctccaaagtggggaaacggccatttttttcacatcacatagaaaggggattttaaaaaaaattaatagtccaagaaaagactacaaggatatagctgtttacaatcacttacatataaaagttatagatgtatagaacctttgagaaagattgacaaataagaaagtcagctaaaaacatattcatctaaggtgttaaataaacatactcacctcacttgccatttcagaggctcgctttgctctttggatatcaagaacttctgaattaagttccattcctttcccttttatctcattttccaaatcttttttatattctttctatgagacaagaatatcacagttcaaaacttagcaggaatcactttattcagtgtgctattctacatgttttctagagatcacagaaatgagaaaatattactaggaaggaatgaatcacacagctaagtattcatgcttttttcctacagacacttcattttcccctctaccaagttcagagtggcttccaatattttcagccttttccttttcatactttctgtcaatatgttttggtaccatagtggattttttttaaagacatcttctctttcaatggtgaggaagatcttaagaacacgtgttccttattaattgttaaaactatttttgaaagttctataaaacatgcattaccaaaaaagaacatggttgcaaaagaatggaaaattacaaaatcaaaaggagtgatgtagccaaaggttttttttaaagtttaaaaagtgagcagaaaccactttcatttgactcaggtcattccaaaattataagcagcccattccaatgtctagtaagctattaggagtttcaattacttgggctcaccacagcctgatagatggtacttgaaagcagatacttcaagcactatccatcacaattactttaggtatttactttacccttttacaagcctcagaatatttcaaggccccctttactatctctgatggaatctatggctcaacattcatgatgatgaatggaatcatccatagataatgaaatgtgcatagatgatggaatctatggctcacgatgatgatgatgatgatagcgatgatgatggtgatggtgactcctaggttgcaaatgacagaaacccaactcaaactagggtagaccaaaaaggagatgcaatcactcatggaatagaaaatccaaagattgagttattgtccagttggaattcacatgatgtctctctttcttcatctcttggttctgttttctctattggctttgcttttggaaggctgtctccatgcaatttaaagaattggaaaaccaaaacattttctacacattaataatagtttgaatttcacccatttgaatgtcatattttaagtagatccaaatgccttctatgaatacttacatacaacttatttttctctgctaatgagttgcttgttttcttacttaattgcgtatgaaaatcataaatatcttattcctattcaactaagttgcatttatgattaacttgccagatgaaagatgaaatttcctttattgataagaaatcaggttccagttaattctagggttcatttcatgttactttcccttcatccattataattaaattagcctgtcctctgctcaactaatagcttactagacattggaatggactgttttataattttggaatgatctgagtcaaatgacccgagtgaaagtcagacctctttcatttatttcgtggtgtgaccttcgggagtacttttaagtaactcaaccttgatttccaccttggtgaaatgaaaataaaaatacttgttctagtaatgtcaaagggcaatggggggatcataggaaatgaagtataaaatgatactttgaacactctaatgcaatgtcaatgtaaaaaccacaaagtaaaaaatgcaaagttcatttgaagctaaatgcttacacttacaaagggaagtaataatttaattaagtcaccaaaagtcctctttttcaaattagacaagctataactattttttaagttaatttttaaaaaattcttattggaagttgacaatttatggttgcatatatttatggggtacagaattgccataatttatgaatacaatgtggaataattaaatcaatctaaataatatatccattacctcaaatatttactttttcgtggcgagaacatttgaaatttactcttagcaattttgaagtgcactatatactatcttcaccacactgtgcactagatctcaaaaaaagtattcctcccgtttagagattttgaactctttgactatcaccttgccattcctcccaccctccagcctctgtaaccaccattctactttctgcttctaggagttcaagtattttagattccacataaaagtgagaatatgcaggatttgtctttcagtgcctggcttatttcacctggcatcatagtcgttatgaactaaatgtttctgtcccaccaaaacccgtatgttgaagccctagcccccattgtgaccgtacttgaaggtgggacctttgggaggtgattagggttagatgggattgtgagagtgggactcccttgataagattaatatctctaaaggaaggaggaaaagcaccacagttctatccctctactgaagtcacagtacaaaggtgtctgcaagccggtaagagggccctcgctaagaatcaaatctgccagcaccttgatcttggacttcccagtctccagaactttgagaaaagtctgttggttaagccacttagtctgtggtattttgttatagcagccagaacagaccaatacaatacagtgttctgagccctttcctaccctgatgcatgtattctgaattaataaattaagactcactccaaaacaggaataaaagaaaaaggcaatggcacatagtaaagtcatttatgaatctcaaaatagacttcacattgccatttgtatataagtgattaaaaaaagattctcctttaaaaaattaacataaatagtgtatttttaaatggaagacaacagtagtaggaagttgccattatttgaaattgttttaaaaataattattaaacatttttcttccaaaaagccttatggccaactatttctcttttttccttttatttttagttgacacataattgtacatatttatgggatacagagtgatattttaatatgtgtacacaacatattatgatcccatcagggtaattagcatatccatcacctcaaacatgtatcatttctttgtgttgtgaacactcaaaatcctctcttctagcttattaaaaacatccaatcaattatagttaaccatattcaccttacggtgctgcagaacaccagagctcattcctttgtatcgattaaccaacctctccccatcctctcctcctgccactgtgtcctagcctctaatacccacagctctactctctaggaagttgccatttgcttagccttcaacttcaaaaatttttactaggaactagaagtgagaaaagatagtgcagcaagagaactcttatagaaattacatgtctatttcagcacattacatattacaacactgaatcacattaaatttctaaaaccagttaaacggtatgaccagttagcatttgcttattaaagaagttcatgatgatgtgctcctataggcaattaatctcaaatttatttcactggtctaagagatttccttcaggaatagtttcctcagttcaaaaattcaaaatgaaatgaaatttcatatgtatgtatgtaatatacattccgtttatatatcataaaatatatattatattgtgtataagatatatatacaaatattacatgatatactacatttatacttagggaacactttcccttaatataaagagtatataagcagatttggaaaagctatgagctactttttgaccatttaaaaaacataaaaaaaaaaaagcttttaaaggtggactatagacatgatatttttagttttaaggtcttaatattaagaaaatttaatatattacttgtgagcaaaaagtgcaccattatgtttttggggaaatttttgcagagaataaaatgaaaagtggacatgagttcctctattctatatgttaaatatattatttttccctacttagaacacaaactacttataagtaatgtagcatttatccagaccttcacatgtgagcatcttatttctgatatcaaatgtcaagaaagggagagaactctggtctttttcctccttcctttagagacatttgctgcaggaaagcgacaggaaaagttggttctaaaatgtttttataataactaaatttgaaagaatcaagctctctccacccatattcaaaacatttttttaaaaactgctataaagctataaaactatttatagagcttctgagctacaactaaaacaaaaaactaggctgtttttcaagttttcccaggaaatctgggtaatttcttctcgcaactttaatgggaaatgttaacacacactttcttgtttctaatgaaaatgcaacactttattagtgaagatcaaagtgaaaaaaaagagtaatgccttaatatctgaaacactgaattagtagagaattaggtaaacatttcctgggttttttctttacttttcttcataatatttaataataaacaccaagatcgtacctccctcagaaggttggtgatgtactttacatgtaaaaattctggagtcttgtctaaatccagtgatgaccttcctttaatctccttctcaaaatcctctttgtaaactttctgttaaataagaccacataattttaaagttagcaaatatcagtgaccattgaaaagagatttgaacaagagttcccagaacaaaaatgatgttttcttaggtagttctaccacctgagggtcatcctatcaacagggaaataagttcaactttgtcataaattttagaattctaccaaacaaaggagaattattaagtggactcttcctctggtaaatcattctaagtgaggcttcctaacatcttactagcctaggattaatatcagcccattttttggaggagaaccaacaagactggctatttgactggatcccccaattggtttactccaaggtgagtggatccactgactgggggaaaatctggtggcacggaagccattcaaaccaccttcaaacccaagcagcattaatgttcatgtccccatcatccttcttcatcagacttttgcaaatttaggaaatatcacttctaaaatgtaatgatgcctgagggttagggagggggtttccctttaatgattttggagttgagaatatttctctaccatctatggtgtttgatatgaatgaagttgtgctgtgaggagaattttatcttgaaccttataactgaactcctcctttaagtgagagttcacaacaagaaatgaaaggtggatgcgacggtgatagctgggggcttagattcagaccaccattagcctttttaaaacactgagccactctttggctatgactctctaaattctaacatttgaactacacatttgaaaaatcagtgataatgcatgctttatgactataaagacagcctctctaaataacaaaaatatccatccatgtgaaatatctactaaacaagggcccagattttaccagccaaatattttgttcaaattgcatccctgaaatgataaaagtaaataaattctgcatgaaattgttattcaggcaaaaagagaagctgtttccaggttgattatttattcattatagagataggtaattttataaataaagaatgtctctaaaccatgaaggagaataagagaagcatgctgtctcctcacttagcacatgtgttccatacagcaatctaacaaacaacgtggatatagccacaaggagagaaacaaaggatgttctgaaagtctaacaaagttaaataaccagttgcattgagaacatcctgaactaaagaactgagatacaatgaccaaaaacaacgactagaaactttcctcttccttatgtggaattagtagagataacagttacaaggctgaatctagggcatctctaggctaaaaaggactctttaaatggtgaaatagaaatatgtctatgcattcacgcatgcatttacatcagctaattcacttcaaaaagcccttctggaaaaaaaagttattttactgaagtaagtcattaagggaggttaattacgactagaagtagccaaaatatatagctagaaaaaaaaaaaccttttgggtatgctttttgaagaaagcagtatttgtgaaataagacaaagaacttttcaagccaaatttaaagatttcctccagaaaacacacacattaagcctatatctgccattggaagaaagtatgataaacttaattataggccatagcaaagacaccagtggcttttcttgggatcataaatacttaagtttacctgtaagaggttccttgaggaactcatagtcaaacctacctcttgggaataaaaaaacatctctaagacaaatgattctctttatacctacttcatcagtcctatatttaaaaatattttttacaccaaactttgtctaagacttttagctactttatttttctggcctttagcatatgaattgggtccaaagatactttctactgaaagatttcactctcctcaagaaatgatggttgagcctaaaacatctaatagtcaatgactataattaaagggaatatatgtcagggaaaacatgtctcacttggcaagagtgagagaagaagttgggtgaagaaaagagagactatctaaaatcccaaatcataaattactgttatttctactacagaaacatagtatttgaatatattaatcatgaattataagtttctggatttatcagtgaaaggaaagttatccacagaaggaaataagaaagttaagaaactgtgcaaccagaatgataaaaggttgctcagcatgaatgtttctagggctgaggatcaaagaagaggggagggggtaaagggaaaggggcaggggaggaaactagaaggaggtccagcctgaaatactgatgctgccagaaatgttctcagaaaaggaaagtgatttttgatccctgtctctttcagtgaaaatgtatgttaacagcttcatactgtcttaacccatttccgttttgcctcaagaatattcttgtctctaatcctaacgtaacattataaacctgtctgttccattagaattagagacaaggtctgtttagaaataactccaagaacagtttttatattttattttcacgttgaaaatcaggtccgatttgcttcagccccaaagagcatgtttatgtaaaattaaatgagtgctggcagcaaactgcacattttttttctaaatgggaaatgggttaacctttcagaagacccactaagcaaaagcactatgatagctcctgaaaacagaaacctttctctgggctgtgggtcagtgacaatggccacattatctctacaaaacagggacattcattgggtggctctactccatccaaaaagtgctgctgcagaaaaaagtgctgctgcagtggaagatagtaaagcaatgaaaagaatgtataaaatactttatatactttatacagtgtttacaaactgttatctaaaggaagaaaaggtaatctagggaaatttattccattaaatgtaaatttttgtagggtttctgaactttgaccaaattcactagtatcaattcacttgaaacaaataactaatttaatcaaaatggttacttcatatttctttatcagattcctcttcattggcttaagaagatacaagacaggagtctccaatccttagaccatggaccaatatcaaccatggccagttagcaacccggtaacaaagcaggaggtgagcaagggtgagggagcattcctgcctgagctctgcctcctgtcagatcagcggtggcattagattctcatagaagcacaaaccctattatgaactgtgcatgcaagggatctaggctgtgcactccttatgagaatctaactaaagcctgatgatctgagatggaagagtttcatcctaaaaccatcccctccaacaccaccaccactcgccagtccatggaaaaattgtcttccatgaaacccatccctggtgccaaaaagattggagaccactgaataagacacaaaaaatacaagtaattctttttcctttttgcttgaagaagaaattaaacaattttgtctattcagtaaaccatagtaatatctgagtgcctttttcccaagaatatgaattataacatttcaacaaatagcatagttaatgcttacaaaattcctgagagtttttttgtctacaagttatcatttctgcctgttttgatgttgttattgggcaacagaaaggatcttattcattgagcatgcctagcatgaagcatcaaggttgtattggactgagaccagcatccactatttctatccctttgcattaagaacccagctgcacccacaaaactttgatataggctgcagacaaaaccttgtgtgtctgatcctgaaaaggtaagaaggaaaacacacacacatacacacacaaataagtctcgctggaacagagaaaaaaaaagtgtggggaatatcgagatgttacttagcataatcttaggttgagaataaagtaggtaagtagaaaacactcttaattgtttattgaaaaaaaatcaatcaaatacgccgcctatgctttgaatgtgtcccttcaaagttcgtgtgttgaaaacttcatccccaacgcaacactgttggggggtgggaactctaagaggtgatcaggccatagcgctctgcctcatgaatggattgatgccaatatcatgggaatggttttgttaccatggggttgggttcctgataaaaggatgagtttcccatctcctcctctaaggcatgtgcaagcactctctgtctttccaccttctgccatgggatgattcagcaagaagacccttggcagatgtgaatccttggattttgaacttccagcctccagaactgaaagaaattaatctctgttctttataaattgccccgtctgtggtattctgttatagcaacacaaaatggactaaaatataaactaaagagaaaaggaaatcattcatgattttgaccaggtgctaaaacattaacatttactggatacagaatttcatctaagacaatttcagtagacacattcttaatctacagagaacaccttcctagcatcattactttgaggactaaatgagctgacatatataagactcttagcatattacctagcatgtagtaagtattttaaaaatgttagttctattttcattgaaaaaaaaagggggccaggtaaataaagcaaccagctattcgtttttagtttttatgaactcatcatagttttacattaatatctgaaaggcaaaaggtaaaattaacatttgaaagtgtcagttatattatcatagaaaattagaactgagggggattttaaaagctcatctagcttgagatccaattcaccaatgagagaagctaaggaccagataaactcaatgacctagacaagatcccaggcagtgggtggctgggtctagaaagcaggtccttgaatctgcccacagcagcactcttccttccagacccactgaacattctgcgtcctttcaaatgacaaaacatcaaatttacattaaacaattagtaacaaactaattgacctacttcactttgcatcttttgagcctcctttgaagcttgatatgatggtgtctcaacaaattcaagcattggctttcccttatttttctcatattcttctttatatttcaccttcattggaaaaagaaaagcatatacaaatcgaaagtccttatacaaacagagcaaactaagaaaaaatatatgttctaaactagtcatcttgttgtctaaaatcatattattctggccatttaggttgagcactgggttccctttggttaatgacatacaaggaaagtaaacaggtaatataaaatatcttaagggataaaaataatttagaacaactaactaatgtagttctaggagttgtataaagcatcttgtcaaatggctggaatatatagatatgtatcgtatatatggggttatacatgtatatgcaaatggcatacacacataggtagcaggtgtgagaaagagagagatccttgaggttgcattgatgtctattggtaaatcaagaacaagaaagaaaacatgggtatgattctctattttttctgtcaaacggaggaggatgtcctccagggatgctgaattttttcatagacactgagtaaaacactcacacagaccttatatgatttatatcaatttcactatgcaatatttaatatcatattatgaaatgtttaattcaattacagtctaatcctcatcttacttcggtttataaaatgagtgatattttttatcttccaataacaaaaaataatatgtaagccatcacaatggttggctttttaagcaatatactgtttaaaattaaactcatagaagtttttatacttcatttcattcagaaatgtgctcttgataaaatttatgtttaataatatctatacaattatttcttaagttattaaaataataatgttaatgataattcaacccaagagaaatttttcaaacttagaactttatgaaacaggaaatatgacacattttaaaatacctatttgtagacataattttgttgcaaagagtatgatagagtaatcaataaagtatcgggaagtataataacacacaacactaggatagaactttgtgaaatggccgggtgcagtggctcacacctgtaatcccagcactttgggaggccaaggcgggcagatcacaagatcaggagtttgagaccagcctggccaatatagtgaaaccccgtctttactaaaaatacaaaaaaaaaaaaaaaattagccaggcgtggtggcatgcacctgtaatctctgctactcgggaggctgaggcaggagaatcgcttgaacccaggaggcagaggttgcagtgaaccgagatcacgccattgcactccagccagggtgacagtgcgagactccatctcaaacaaaaattttgtgaaataaatgaaatgaaaataagtaatttttagaaatgatgtatatttccaaacttaaaggggaactgtttcgtatatttttaaaaccaatgaaggtgagtacgaaattattatggactttaagttccacagaatacatttaaaagagtgatataatattttatcttaacagatgctggaactgacatctttgcaactatttaagctcagaattaaaaaaaaataacgactttaaagtatgctagagagaagatattttttaagtttattcagggggtacctagaatttcatattggaaaaaaatattaatcaagaatacattagtcatattgtattcccttttaataacacttataattgaaataagaaattataataaaccttgcacctggaaaattaacgttactgctcaaaatgacaaatcaagacactagaaaaatttaaatcatcatgtggtttgaccatagtttaattaattcctatcttgtaactttttaattatgtgaattaacggttattttacaaaatgcctttagattgaaatatggttcaagctcccctgaccccaatacctacacagcaaatagtgtttgagattttcaaaagtaatgttaatattctcaggatttattcttttctgcaactgtactttctcagttaagacgcacggcagtgagcggcgggcctcaggatggttacgggttgctggcagggagggtaggtaccgtacgggcaagtgtgtacctgactttggaggacggcattgcctttatggtgcagatgttccacagcatctgcatcaaaatgatacattcctttgttttcctcaaagagctttttatattctcgctaaaatacagaatggggaaatcaacttagaatcaaagagactgattagagcaataaatacttagaaatacaaactgcacattacaagccaccaagagctgcaaagctgttgccaagtccccatctgcagttggctggcaggtaggaggtttctgacactgagatacacagacaatgcaagacagaccagctctaggtcagcatatgaaacacgcaagagaggcagaggacaattaaccgcaaacataatgtaaaggatattcacaacaccagcgtgtggcaacggaaagctagcgctaggacatgcggaaaaaggtaaagtggggaaaaataaaagcaatttgtcttgctcttatcttatgacaggaatatgtttaatactgttcaaaagaagagaaggaaagaaaagcaaaaagaacagaggaaaagaaacccagaggcaaggaataaaaaagtcctatacaaaaagactccaccacaaagaagattgagaggcacaaggaaaatgtaagagaaataagcaactattgttcctaaaaggaaagggtaaaaggtgcctgaaagagaaattgagaaatctgggaacagtcagttgagtttttaaggtgaaaaaattggatgaaggctactatttggacatatagacaaaaagttgaatttggaagacaccaaattgaacagggatgccaagtttggccactgaaagaagctaaatgtaacaggcagcaatatgacaaaaattgtttcattagcaacctaagtgtccatcaacagatgaatgaataaagaaaatgtggcacatatacacaacggaatactatacagccacaaaaatgaacgagatcctgccatttgcaacaacatggatggaactggaggtcattatgttaagtgaaataagccaggcacagaacaacagatttcacatgttctcactcatatgtgggagctaaaatagtgagaccccagttctacaaaaaataaagaaatcagctgggcatggtgacatgcacctatagccccagctactcgggaggctgaacttatgaagacagagtagaatgatggctaccagcagctgggaagagtggtggggagaggagataaagtggagatggttaaggagtgcaaaaataccgttagagagaatgagtttaagatctagtattcaatgccacaatagggtgaccatagttaacaataatttattgtacattttaaaataactaagagtggaattgaaatgttcctaacagaaagaaacgacaaatgcttgaactgatggatacctcaattatcctaatttgatcaatacacactgtatgcctgtatcaaaacattacatttaccccataaatatatacaaccattatgtatcaataacaattataaattagaaaattttaaaaataattatttcatgatttctatcattggagattggacactttgttattttgccttatttggaaaagacctttagtagtaaatggtagctcttaaagactcaaggctacagagacttaagaagctaaagatagctgcttattagacaatggggtaccagtaaaaatggcaatagagtggagggatccaaaaacagtatttgaaagggagcgggaaagagctggccataaggaaatttgcattttgatcttaggggatactccagggatttcagagtgaaagaggaagaaagctcagtgctaggaatggaacagatgaccaagtggcctgccacaagagagctaccctttctagtgggacaaagcaatagtccccagagggagcctggcctcaggtgcttccactcaattagggagctgcaatatatgttcccccaaacctaaccagaataaaatcagggaggaaagcaccccccaggaaggacatgaaaatgttcatatagtacttttttttttttttttttttttggacagggtcttgctctgtcacccaggctggagtgcagtggagggatcatggctcactgcagccttgacctcctgggctcaagcaatcttcccatcttagcctcccaagtagctggggctataggtgcatgtcaccatgcctagctaatttctttattttttgtggagctagggtcccactacgctgcccacgctggtctcaaactcctggcctcaagccatcctcctgccttggcctcccaaaatgctggaattacagacaggagctactgcacctagcccacagagtacatcgtgatggaaggaaacaagttataaattttggctcctctaatgtttttttaaaaaagcctttttttggctaggcgcggtggctcacacctgtaatcccagcactctgggaggcagagacaggcggatcatgaggtcaagagatctagaccatccctggccaacatggtcaaactctatctctactacaaatacgaaattagctgggagtggtggggtgcacctagtagtagtagtcccagctactcaggaggctgaggcaggagaatcgcttgaacctgggagcggaggttgcagtgagctgagatcgtgccactgcactccatcctggagacagagcgagagtccgtcttaaaaaaaaaaaaaaagtgttttttttttaaccagttaaaatctggaaagaaagataataatacagactttataatttgattagaagttatcttgtaatatgtatttataaaataatcatgaatgtaacaagctacaacatagtccattactgagttaaaatccacaacaaatacatataaatatatgtaaaataatgaatatatactgaaaaattcagtaaatattgttcccaacacaattatcgattttagttacaaagaatttcagaaactcctatttaagaaaacaaaacaaaacaaaaaaaaaacgaaggaaaacttaattgaattaagatctgcaaaagaacttcgaatgcgtgtctttccttatataacagtctctgctacctcctagtgggagatacacggagtaacacaaaatatatatttcttaatttatgtaaagttgtgaaagaaactcaacactaccagaggtccattttccaggggaaaatgttttccaaaactttaattagaatgattttacacagtaattaaggcactcatatcactctttagagtttgggttaaaataaaagtaactctgatgttgctaaagacatctaggggtctttaaaacaatagctactgtgacaaatggataattttggcagaatatctcttattgagcaatcttattcaatcttttaatttataaatcaacacaactccaattttttacattaaaatgttaaagtaggctattctttgtttcttcacaaatgctagataaaggaggccattctaatatacaataaagttgagcaaatgtatacagctttatacaatgtacacaactttgtaaggagacacttcaaaaggaacacatttttaagtctttctctcccaggaagtagtcaatcacaatttgtctatggggaaaaagaaatctgtcctctaggcaaaagcaccacctaaatgaagatctaaactttatatatgatacatgaaataagtaacgtatgactttgctgtgttttctctgttgaagagatgatagaaacaatttatattagactgcgatttttttctctgttattataaaataaaggtcaacgttcttgaaaagcaatattgcataggagtggcacgctttcttccagccaccaaatgttgaaattaccaccatgatatttttattggcttatttacacatgaatccccatgtccctaggaaattgaatttaagtatggctagagaaaggtcaagggcaaatgccactgccatgatgaaaactggatgccaaagaatgaatgtgaagaaagcagggggctcagggaatagaaatatatcaattttagaagcatatctatgagtcgtggagaaaaaagacagaaatagagacactcaaggaatagaggaatgtaaaaagaggtgtgggaatgaagactgaagtgcaagccagcatgatgtaagtgtcctggaactgactgccaattctgggccctccagatattcctctaacctccattccctgttcaatagcctgggaacattaatgtactgcttttcatccaaggaccaatgattaaaaaaataaataaatttatttttattttattttattctatgtatttatttattttttagacagagtctcactcttgcctaggctggagcacattggtgccatctcagctcacagcaacctcccaagtttaaatgattctcctgcctcagtctcctgagtagctgggattatagatgcccaccaccacgcctagctaatttttgtatttttagtagagacgaggtttcaccatgttggccaggctagccttgaacttctgacctcaggtgatccacccgcctcccacagtgctgggattacaggcatgaaacaccatgcccagccagaaaaaaataaacttttaaaaactctgtatgaattatttgcatgcataataccattaaggaaggaagacagtggcagtgatattccagaaaggaggcttacaaaataataaacatacatttcaaaacactgaagccaagtatagattatttctaaaattgacctgaagctgtatctccttatttaactgtctggaaactaagttttgcctatagatttctaagtctaggcccatcaactgaagacaactatcttcattttttctcatgtcttccccaacatatatttctgcatctaatctatgcctggcccaaagcagatattcaataaattatgattaattttgagcaagtgagtgagaaagtgattattaaaataggtatggaaataacttatggtcaaataagagctcattgccaccatgagatgtacaaaatggagccaaatgtgtcttagggctgtcagttacgagagctagcgaagtcagggtcctgatgtgctatgggttgaaacagcattcagcgtagtgagagtcctgcaggactgaccacgtgggcagtgcacccagatattttcatcaagacatgaagaactcacctttctcttctggttgccttgaccgagaacatggaaaccatgacaagactaaaagcgatgtgtcaatgcagtataaatgctgttaggaattatttgcagagaaaatacagtttagactaagacaatttttcatgctactgaaggcgtactaaatacaagacactctggtctggcctgcataaagtaaaatatccctgacttgagagcctgaacttcaagtggctttaatctaacacagatgaagtaagggaaagaagaatgatggaaaggccactgtgcagacactttgaagtatagttgtatgcaggagatactggagagcaagcaagaacctcctttgcaaagtgacagctctggtgggatttctgcaagcagaggactgtttttcaatgagttagttaacgagggaggagtgaggcacaggccttctaaggaagcaggtgagcacatgaacgctgcagacatattggcttcttggagccacaaggcaactacggttgccgctagatgaaccacttacgccgctgagcattttgctggctttcaaaacatggtctaaaaacaacaaatttgggagatctgaaactggatcatgcatattttgaatgtctttcttgtacttcacctatgaaaataacatggaacaaaataccatcgaggagaagaaaatattatgcttttgcattattgcatttttcatacatcataaagtaggactatttagtggtaaatggacagacgaatttacaaggagccactagatggtgctgatttactactgaatgaattttaaaaagttatttctatatgggcttgagaatacttggataattccttttgttgttcacatattcaggaagggtaatgtcaatagaataaagtaattttcacagtaactctgctttcaaaaaataaagagaatagccactttattctttagaaattactacagtatttcaactatgctttgtggagatctgaggattttgatgtttcccatcctatcaccacaggcttttttaaagcaactttttgaaaatataataccagtaataataaaccattgatagcaagcatatcacacacttactatgtgccacttttctaaattcctttatatgtattaagtattgaatctccacaataacctctttattaagtaggtactttaagtagccccattttatagataagaaaactgaggcatagaaagacaaagacatagtaatacttgataaaacaggatttagatccaagcaatctgactccaaacctttagctttcagcactatgttccatgttcctttaagtatatttcatctctatttctaagaaagcaacagatcaataatacataatttttatacttgagaaggaaatctaaatattttcaactatagcaaagtaatcaattttttgatgttgctgtttttatactctaattctaacaagaatttaaaacatcatttcttgtaaaatgaattttgatgatttttaaaaacacagaatgaaaacaaatcacataaggaagtacttcacagcattttcacaagggataaaaaataaattgtgaggcattacagtaaaatttctaaaaatttctttatatgataaattaccatgtaccaggcagtactttacaataaactcaatttcatagccataattacatgaggtaactactgtcctaaccactaatttgtgttaatacagaccacttctctgcaaaattctataatctatttccactcttgaacagatataataacttcatttgcaacactattcctacttattaactaattagtaatcagtaaccattaaaaattaattacaataatatatttttctcagaaaaagctttagaaaaatatgcttcagttcaactacaaattacttggaagctaagtatcagtaattacaacacagtcgattctaaaaaaaacaagaatcaaaagattttgaaaataattttctatgaattacaacttacattgctcgccagtgtagcagcaagctgattctgcctaaaagaagcactttcaagaggattgtaatgatgtttcttatccttcatttcattatcaaatttttctttgtatttaatctgtcataaaagagaaatagtacatgtaactttacatttaaaagtaacacatatgattttcacgtagataaaataaaagctaccttaaaaatgaatgttgccaagtgtaaattcctggtatccatcgccttctataaagcttaattaggcacaaaagtttttatctttaataaaaaaaactctgcttctacattgatcacaaatgcaattaggcatgaactcaaatcctattaatgagaattatgcactaaaataccaacatttttaaatgtcagttttcatttctgcatttctataatctatgatcagttagaaacctagaccacaaatgtcttaaggtctaacacatttagaaaatagattctaggccccagaatttaaatatttttcctaagggaattattccaaataaagagcatgacgtgtaccacagtttttctcatcatttcctatacttcatttgctcaaaaatttagttttaggaattacattttctgaaatgtcctgggtcaacttaatgtcaatgtaaaactttctctgctttaattccactaaattcagcaggaaaaccatctccaatactctctctaaattgtttgtctccttttaaagcactcttaaaacaaccaaaaagggattatcaacttatttggtaggactatatttttctccatgtatagagaaatatgagaatgcatgtcataactaattagaatataaacacaagttcactacaaaaagaaaaaaaaaaaaaaaaaaaacctagctattcacatgtcataccccctttaacttactgtagccaggaaagggtgtattgatttcacaggtcaaagtaagctgttttgttctctcataatatttttctgatgttataattattaccatgtttggttttctaacaacattctgataatgcacctttattcatacatctaaaggctctgctttgcagaagactttattaaaaagcaatttgggatgactctcatcaaatattttaggcatgcatagggtgatggtctccttcagggacacatgtttggaacctattagagagagctagagaaaatcttggtgggaatacagcatttggtaaatattttgagatggtttacagggaatattttctgttctggttccatttgataataaaaaatttctgatattctcaataccttacaaactgattttaagtaatcagcaagaactctttaaaaaaagaaaaactgactttttttattattttgtgtcttgaaatcaataacaaaattacaaatgaaataaatttagatttccttcagtactttatacagtaggtggcacaaaagcaatgattcactctgcctggtcgtcccttaaatatatagtcttagagtctcactctatcacccaggctggagtgcagtggcacgatctcagctcactgcaagctccacctcccaggttcacgccattctcctgcctcagcctcccaagcagctgggactacaggtgctcgccaccacgctcagctaattttttgtatttttagcagagacagggtttcaccatgttagccaggatggtctcgatctcctgaccttcatctcctgacccaccttggcctcccaaagtgctgggattacaggcgtgagccaccgcgcccagccacagtcttattgccctcttcacccttctgctatacttttaccatattttcgtcactggttctgtctctcctaagtttgtagtgcctaaaggatattcactgaacaaagatggtggactcttcaacagccttccgctggaatgacacttctgactcagccagattcattaacactgtattagctaaatggtaaaagtaggttatatgatctttgcacacacagagcccatcatactgtttttgcaaactctgaggtttccagcataattacactagagtatttgaaaatgatactgataaattcctttgttattaaaccttgcatatgctctcccaagtaaatgttacagacaccccttcctcaacttatgatggggttgcatctcagtaaacccaccgtaagttaaaaatgtaagttaaaaatgcaccatatacccctaacctaccaaacatcacagcttcgcctggcctaccttaaacatgctcagaacaactcccttagcctatagctaggcaaaatcatctaataacaagcctgttttacacacgttgaacatctcatataatttgttgaatactgtaatgaaagtgaaaggcagaatcattatatgggtacttgaagtatggtttctactaaatgtgtatcacttccacgccatggtaaggttaaacagtcttaaactgaaccactagaagtcagggaccatctatgcatttctaagaaacaataatcaatctgttattcatatatttatattaaatgtaataataagcattgtattgtgaaatttatcttgtttgaacgttcagtacagtgagtgatttgattcaagatgcctaaggaacaaaaacacaagtttccctcattaatgaaccacaatagtaacataactacattatataaaaaaatgcacggaccagacactgacacccaattgtttctaacctcgctctttctgtaaggaatgcaggtaaaatgaactaagatcaccaaatggttgcagtgagtcacatcactcaccttcggacttgttcactcgccaactacacagacacactcaacattctattgtattttcaatctagagttcatacatctgtgtgtctacctcctcatgcaggtttgcatcttctgagagatccaggaaatgcttttccttgactataacttgttatccaaccatggaacaaggcataaccctttcagttttaagatcatttgagaaagggaggaacaggtattggagtgactttgccatggttttaagacacaatgttactccttatacctacataattattctggaaacaaatgaagttactccatatgactggctttatttacattatgactagtgtgcctagtggtcccaatatttatcacctttttttattaattttttttatttttaatctctgtgggtacacagtaggtgtatgtattatatttatggggtacattatatgttttgatacaggcatgcagtgcataataatcacatcagggaaataacaccttttgaaaaaatactgtataggtatataggatcaaactcctagatgttttttaaagaattataagagacagcaggattttcagaggctcacacttggagaaaacacggatactgttaagctacagtgacggcattgtagctccccataactgcacaacttctcatataaagaaatgagaagttacatctgcatatcctcatatgaggatccagatcctcataactgcacctgggtatgtgtgaagtctaacacgcaaacccaaaactttacactgacatcatctgtgactcagaatcgcaaaaagccagcaaaggcacaaaaaagcagaccctgaatgaaggtgtttcaccatagccacataaacacattttagcaaagaaatagcttgataagtgtaccttaattatcattgaaaatgaaaagtaagcaaataacacaatactacgtatctatagatatcaatccccagcaatcttggatgaaatcaaactaaaagctgtcaaggaagacaggacagatttttacatagaactcatcataaaatcaataatatctttaagtcttaattttacacaacacaatatctctgctcttattttccttgcaaaataacgtcttactgactttgcaccaaatgttaatgatccagagaatattggtttaaccaggctccatacacctattggcagcctaatctgttttcccataatagtggatcaaaggcatatgagccctgtctccatggagcctgccttgtgggaagtgaaatggatttcgaaaacacacacatacacgtatatattatgcaactactacaaatcgtattaagaactgtaaagaagaggagagaataaaggggaggagagcaatatttaaattggcgagtcaggaacatgatatttgagctgatacttgggtgtgatgaggttggaggagggagtgcttgccaggatgggagaatggtaaattccccaaaccaattaataccccttgcaatttaaggccactgcttactactaaattttcatggcaatttataatgtgatttttaggtttaaaacccattcttatcaatgtattaatgcaattttaaaacaatgctaattattataaatacatagcttttccttgaggttataaaactgaacaaggaatctattcatcatatagacaaattccaagtaacaagatgatctatggatatattaattaataaactactcttagaatttttaaagtcaatgacttcaacagttactgtacttaaatctgagatacatatgcaccaatcccttcatcttcgcataggagatttttgttttagttttttaatgactttttaaaataacctggccataattgtatgtatattgcaaattttaaaaagggaaagtttacaactacgggagcaaagctattgtagaagttaatataagaagggtttggtatgtgttcccactacctttcctgggtaaaatcccacagagttcaatttacagataaaaggtgagaatcctgcccattcactctctgttcccatcctttcatcagacaggtcttatctccacatactttgaccattgccttgtcattgccttctctgttacaatgcttctggtgctgtggtgctctttttctccctgcattctatccattctcatctccctgttattaaatccctaaatcatttgccttctatgtatttatgtgcctttatcattagtttaggagcaaactaaaaactttaatgctgtcagtgaaaataagaaactaaacttgctgcccaaatttctgttataattgatatacctgaaaatacaaatggaatacactgagttcatcccagaattcctattatttattttcccagctttccccttttcttgtgagttttatacagcttataaaatcttatatgacatgaaaaaatgaatacgatagctataatgtaagttaaaaattaaaatctgcttaagaatctgatcactcagttgctaaataatttgagattgaaggaaaaaaatctgctttcaagtccaagtaaggatcacatgggggaatttttgtggattgaatttgaaatgtgaaaataaagctcaaatgtcaaaactttcttctaagggctctcaaataggattgtgatggaatgaatttaaggccagaatctcacagacagtgttcatattccttctccactctgtgcatgaattcatctaaaaatgtagaacagaaaactattttgaatacctaaagtaaaattattcctatgaaattatgtcatgtttctatgggccaggcaccattttaagtgttttactcacagtaactcatttaaccttcacagcagccctgagaagtaaatactgttgctgtcatccctattttacaaatgaggaaacaaaaatagagaaatgaagcaatttgtccaagatcactctgctggcaagcaacagaaccaggagtttaacccaggtacagcccagctccagggtacattttcttaaccactagaccaaaccatactgcttctccgggatttgctttgtctcctgtgtaactgatggggaatctttgtccccagaaaagggcgaagttgtaagaggccagtagctatgctggaaatctgaagtgatgcccatatcccctgtctcttcaactagcattactgggaatatgtagagcttagagtcaccgccctttaatgcaagtgtcacccagacatgtccccaacctcttgcacatcagtagcctcctgagttataaagtcgctttataagtgaaagtcccttgttaactgtaaaacaattactatgaggcacaattgcatttgggcatctctcatgtctgcctctcccagggagcagttgtgtccacttcattttcattcctactgtcacagagtctattcaggtactgatcactttatgtgtagattaccactgtcacagcccagctggcttctgggaggttcaccatttgtgagccagactttcctgcccagtgtcaccatgttaaccttccctaagtgttttcttcacaatcaatctttgctcaaaatcttcagtgatgtcttctttcttccctgagagactacagttaacatggcaaaaagtagttctgatgtttactttttggaattgaaccctaaaatgcttcctataattgcgctctgaaatcacttttttatcattattttttcatagaacacaccattctgggaagggggcgttggggagttattatttaacgggtatagagtttcacttttacaggatgaaaagagtcctggagatggatggtggtgagggtagcacaacattacaaacgcatttaatgccactgaaccgcacacttaaaaacggttcagatggtaaattttatgttatataaatcttatcacgataaaaaaatggggaaaaattacatatatgaacacattattcctattatgttctctaagcaatggcttatactcaaaatcaatacacattgacccattcatcatcacacaatatctaaactcttctcaaaatcctttttatacgtgcacaactatatcctcttgcccagaggctctgccatcagatttctgtcccctggcaggcatactcccagcctgtatttggggccttccccttgagtagagtttacttctcccattaaatccaaattagctaaaatctacctcctacacatgaaccttctaaggacgcgtctttcttctccacactaacaagacacattgtgatgggtgtaaatgggtgtaaaagacattttgctttcactttgttggtatttccctttctactaataaatttgggcatcttttcacctgttgattggccatttatgtttgctcttctgtgaattatctatttcactgacccctttttctactgagccgttaatctttttcattcatggtaagaacaacattggacccaaatcttaaactatatacaaaaataaattccttttcaagaatgtttatatattatagatattgtacactatagatcttatatttaaaatattaaaatgttctcatcaaatgcattagaagtacttttccaagtatttgaagacttctctttttttatattttaaaaaactattctcagacacatccttctctgtataaactctgaattatttaatttattcaagtttttcatttcatttaaattttttaaaccctctttttggattgcaattggaattgcatagagcttttaacattaactttgaaagagttaacattttttaggatgtttagtatcaaggctctttcaccaacagaatagtacgtcttttcatttgttcgggacttattttatgctcttcaatcagacttcatacctttcatcatttacatctctccactttgaaatgtaattcaagtaagacttctgcaacttgagaaatgagtattttcaaagtcaaaaaaactataaatgtgtaaaacttactgtttgttaacattattgttgactctgcaaacattacctttttcattcagagagtttttcatttttacatagttaatgtgcctacctattatagcttctggatttctggtcttgcttaagaacaactctgttatccttatgtagtatatagagtctcctggattttctttgaagattttaaaattattttattgtttgcattcacatttttaatccacctggaattcatttttgtatatggtttaagatttgggtccaattttgctcttcccatgacagacggtgtgttatgtcagcaccatttattagctaatccaacttcttcccactgacttgaatcgacacttttatcatatattaaattcttatacatactggaatctatttcaggactccctattctatcctactgattatttaatctctcactacaccaatcccatattgatttaatttcagtggttttctattaacttatagtaactcataacttaagttccccttcactggtcttcattttcatacttttaaaggctattccctggtattttctttccacacaaactttaagatcattttatctatattaaaaaaaaaaaaaaacgctgttggagtctaacagaagttgcatgacgtttatataattctgaaagaactgacatctttatctattgaaactttcagccaaaaacataaaatgcctttatactttttcagatcttattttatgctctttgataagacttcaaagttttcttcattttcatctccctttttaaattttgtgattaaacaaaagcacttgaaaattgggaaaattaatatttttattactaagttaaaaactgtgtgtgtgtgtgtgtgtgtgtgtgtgtgtaggttaaaacacaattatttagtatgactattaatgacttctggaaatccagggaaatgtgacaacatggctagagacattgaaaaatgttcagatttatgcctggagaaaagaaaactttgttttatgcttaaaattagacttaatttttttcctttactgaaattcataatgattgcaagcccatctgaactgggttcagaaacattatctctgtttattcttgcaattaaagatattatctaaaatgcaatattctcctgtgctgttagaaacaaaatatctgaataaagtcattgtggaatcatcactaaagccttacttgactagaaagtttagaagcttccacggcatgttcaaaatctggtcttccaattacagcgggctctttattcattattccttgtcctttcttgtattctgcctaaaatgaataaataagacaatgttaaatatttctaccctccaatgatgaactacattgacattagccaaaaaaaaaaaaaataacagaccttcatctcattaatattccttacaacacatcaaacactaaaatgttgactgctaaagcagaaattgattttatcctgtgcttacatgaacaaactcaactttttgcagtaaaataattactaactttgaggctaagtgttcagtcatcatcatgtttgtaattatatataaatactaaaacaaaatattagggaaattttctggggaattgagaccctgtactctccatataggtagcttttatagtttcgtttattctcaggaactgttctggccatacttgattgacatgcagttgaatacagtaatgattgattttagggtgaatttagcctatgttatgaaaatttttggttcaagttaaatcatcatttccaaccagggttttcagcatgttgaagtaaaatggtattaactaaagcgggcaccttagagaaggtaagaaacagttacgccatgtaggaagtggacaaaggtaagtgttggtggaagagaatgtacacaatgaacagcagcaatatggaaacaaggccaagcaagagcctttggagcaaggtgaggggagagattatatgggaccatatgactgataaccctgactttcaggctgagacatctgaatgtcaatttatacctaaatagtatttatttctctaaaagtatgatgacactaaccacagccaatttgagtttgggctgtttctgcatatacccaaataattaacataataaaatagataatttagggggggaaattgagatgtattcatttatattgattagttacactaattaaatgaaccatccaaccactgaagctatgctttgcctcctacaaaagtaagaaatcatttccgttcaaggtttagaaagagaagttacattgcttatgatcttagagatctgggttgccatcttgatgtctggtcggtcaagttctgcactgtacgtgtgggtgtcctgcacgtctttcctataagaaatctgatcagagacagttttggttaaaaaataaataaattagtaatttcacatagctactagtcttagtgttcataacattatttattctcataataatagcttagagagcctactgaccttaagttggctttttgtgcatctatttgtatagctatattaactctttatactatacctatgtctcactgatattaacatatttgggccaggcacagtggctcacgtctgtaatcccagaactttgggaggcctaggtgggcggatcacttgaggtcaggagttcgagaccagcctggccaacatggtgaaaccccatctctactaaaaatacaaaaattatctgggcatggtgtgtgcgcctgtaatcccagctactcgggaggctgaggaaggaaaatcgctcaaacccgagaggcagaggttgcagtgcaccaagatagcaccactgcattccaaactgggcaaaagagtgggactttatctcaaaaaaaaaaaaaaaaaaaacttgaactgaatttatgctacctaagaaataagactaagatcaaagcacaaaaccaatcttaaagggtctttgtatctaccactttatgagtatgtctttgtatctaagtgcatatatttatattcataagcagaatatcctcatcaagaacttcaacttgcccatcacaaagtctcaagccccagtgggtgcaagataagcccaagcacaagaatattgcaaattatttccttggggatggtgggtggtgaagctctgtagttctccagcatttgccctttcaactacacacttctctcccttcaaatgttcaaaggcccatgcctaggagatctaaggtactgagagctttatcacccaataaatatcattggaatgacttgagcctcccaaaataaaaacaattacattgagtaacattctccttctgaatgcatgttagacacaaaccaaagtatggtaagtagagatttaaagagaaaaatacataaactttgccaaatgtactttagatcacattcgtcatttagattaacttgactgacaattggaaagagagacaaaaattgaactggcataatgtccgatggcccatgtttcactggtcagctcacttctttatttcttgcgatttgtcttgagctgaagcaatatttgccagatgtggttctatttggcaatatccccagggaccagctggcaattaaaatatattctattaaagtcataatgcaaagtgtacagtcatggacattcttaaaacccatcttccttttttcagagcacagaaagatcacagaaatgtgtcactggacatctgtacaaaatgcacacttaattacattgtgtacaaatatttctaatgtcacctgcaacctttctgaaatagcatcatttaggggtacttattaaagatttagattcctgaggtccagccacaatcctctgtaacagaattttgacagatggtgcccaaaaatctaattttaatgaattccctagctgactgctataaaccagtgttctgggtaatattcatatatcttgttagtttcctttcaatctagcagaattaaaaatttcaccctttcttactccttttaaaaataagatcaagtgtaagaagtgacaatgcattaatacatcaacaggctccctgtgcgttatgttattttatttcaatgaaacatttatatacacttctacttactcttttatgagcttacatttgcttcaccaccaagactattttttaaactacacttataatcatgaatctgtctgacaagtgaacacagctgaaacacaattagtataatttcagaaagaacatctgttttcttccacatttatattttcagaggttttatgttaacaagtcatttcaggtaggttttatgcacacaggtagtaaaaggaacataaaaataaggccgaaactgagttattttgttgggtggattttaaatctttagggatttttttttaagcaggccaattccattggcttcaaaaagcaacatgcttatccacaaatgatggtaaatcaatctcatcctaccctgagttaaatacaagctgtgtaaacaaaaactggctctcaggtgaaaacaaacccaaattatcacccacctacaagactaactgtttctaagttactacattcatatgaaaaccgcaggggggaaatgtctttttgtttagaaaagaatgagggtaaaaatggaaacccttactttttgaaaagaaccacaacctttcagaaatctaagctttacatgggttacctaattatatggtgttcagcctaatgactgcgtgaagagaggtgaacggcacaaaggcagcaggagcaggactttgaatagggccccatcatccatgtaaattgcaaagtagaagccggcatatgtgactcaaaacaaatattaagattgacatgaactgcaaattcaaacaagaggacaccacggagccacacagaaaaaagcttccgcgcctgatcacttgtcagatcttccagaatatcactccttgggaatattccataggaaagggggcttatgttgggggacattcaagagggtgacactcttgatgtcactatctccaagggtgtctgaatatatatggaatggcaacatggcttctcacacagattcctacacgtaacccattgctagtgtcagaggcatctgaaccacagcaactccatcttgagaagggaatgggtaaaatgaggctgaaacctactgggctgcattcccagatggttaagccattttaagtcacagaatgagataggaggttggcaaaagatacatgtcataaagaccttgctgacaaaacagcttgcagtaaagaagccagctaaaacccaccaaaaccaagatggcgacgagagtgacctctggtcatcctcagtgctacactcccaccagcatcaagacagtttacaagtgcccatggcaacatcaggccggtaccctacatggtctaaaaaggggaggcatgaataatccaccccttgtttagcatatcatcaagaaataaccataaaagtgggcaaccagcagccttcggggctgctctgtctacggagtagccattcttttattcttttacttctctagtgaacttgctttcactttatggactcaccctgaattctttcttgtgtgagatccaagaacgtcttttggggtctgaatcaggacccgtttcctgtaacactaggtttaagggaagctcatctgacatttctcaataagtatttgctccaatctaccatccatcagagctcaggaagaataaaaaatgtaacacagcagaagagaggcttggagttcaaagtgtgtgtatacatatttttttctattccttaataaattcaaaccctaaatgctaaccatattggaacagtggactggccttcactcttcagtcttctcatgacaatgtggtgctctataaatcttgttttgcataaggacagggaaaagaagaaatcatcaactcagcagagatgtgaacttgagggccaataattgcttttacattattttccttaatgtcttgttccctactctgtcctcagatcatagcagagaacaaacaaggaggaggaagaacaggaggaggagggggaaaagaggaggaagaagaaagaaagattaaagaagaagaaagaaggaaggaggaggggagaaaaagaaaataataataatgatagtctcaattttagactattatgtaccatattaaggacttaacattcactccctcactcatacattttttcaaggtatgacggtatgaaatttttcaaacaatcataacatctgctaaattttcatttccttactactcatctatttcatttattttcttatttttattagaataattttagtcaattccacaaaacaaataactgtaattttaatgagcattgcactgaatctataaaatgccttaaagaaaaatgatatcataacaaaatgtcagtcttttcctatgagaaggtggtatattcctccatttcttcgaatattttattataactttaaatgaagtttcatcattttgttctatatgtctgtcactgggcaaagaaattatcatactatcatttttatacatttatcttgtactcaagatgatccactttttccttttaatagtgaataacagtatagagtcttatctgaaaatagtgattctggtttcttccataggaacacctagaattattaccttatgtgcttgatctcttcctcttagcttcttttcactgaatttatctctttattctttctcatttatctaagtcattctcctatctaatccctttgtagtgggcatgtgttaaatttttttgtcagcctaggttttttaatttggaaacagctcccccatcactccatgtgattggtgggcctctgaagttcagcctgccttcatgttgacttaggctgtcctgccagataccccatccatttggaaaccatgattaatgaaatcggacagacacgtaacccaaccaaggccagagtcatttgaatgatctgaggctggaggagaaagagcttctcttcttttctctgagatcagctgctgtaaggatgattaaagtttggaaacaccagctgtcaccttgaagccacagagaaagcacctgtctgaaagtgtcatacacagcccagagcccaaagatgggaagagaggaagagtactggtaacactgtaaagcctccagcccacttatgcctgaagatagcttggatttgtcaattacatacacaacagaatctcatttttcacttgcactaacttgagatagatttccgtcacgaaatctagagagttctaacacagcctccatttcacttttcattttttttcttttttgaagatgaagtcttgctatgtcacccaggctgaagtgcagtggcatgatctcagctcactgtaacctccacctcctgggttcaagtaatactcctgtcttagcctcctgagtagctgggattacaggtgaacaccaccacacccagatagtttttgtatttttagtagagatgaggtttatcatgttggccaggttggtctcaaactcctgacctcaagtgatcctctcaccttggcctcccaacgtgctaggattacaggcatgagtcactgcacccagcctcacatttttctacagtgccaaatctgttctttgttgcttccaacgaatatttgaattccatcaaaatctgtctctgaatttctttatctcgccatattcactttcaccctgagctcatatttttatcttattttattgtcttttaatctcagcttgttctctccttataatcctcccacttctgtttcataagagccatgtcttttgcatgttccctatgctcgtgcagagcatccaaggtgcccggctatccttttctgcatcaattcattaaatcctcacttcatccctgatgtgtcttgactcaactgggctacatcaacactcccttttaagactggaactacatcctccagagtacctttccttaaatagttctgggttagacatggccaataagagaaatgcatatgagattttgaaagtggatgtgaaatagacatctttattctgcaggtataggcagacacatgtgcagctggaggattcacagtggccttccagcaagctttttatactcaggcaacagtgatttgagactctctggtaggtgagttaataaaccagagaaaagcaaaacctccacagactctccttgaagtggaagtcaaggagatgactttcacttggagatgagaagattgagacagctcaggaatggcagccttgcaggagtgatagccagccagccagccagccagccagccagccatggggtctaaagtctgcatgggcagacagaccttaaagaaaacaaatccagctgacccagaaccctgtgaaggttaaactgattcttggtgagaagaaactagacaggatatataaccttttaagtttgtggaacagaggcaaatcatgtaactggtatatagtggtaatctttaagcaatggttcaacccatctcaggaaaacctttgtctttagcaaaactctcacattagagaagccctccaggtatcatcaaataggcatgtggactgctaattccatctcaaatgatgcttatctttgtctaggcatgctgtgcataaaaacctactaaattattaaattgtaaatattatttttctgtaagagaatataagccttttaaatataagtaaaagtaggttctgatactattcagaagagagaaaaagttttcagtcttccaaaagaaggagtaaaatacagagttatggccagaatggcttatcatttaggattgctgtcactgtttataaatctatagttgataaaagttgtcttattttcttattcatgatttaattttatcaccaccatattgtgtagaaggcagaataagtattactaactattctgtcttagagatgaataaaacactaatatatctaattttaatgctaaatcctaaagcactattattgtaagtctcatcggggaaccacagagagccataattgtttttctagtatcattttactgatttatctttaagctttctcactttctgatggaatagaaattgtttactgataagtttttattaattttaagaaagtacatatatcattcttgaaaagaacagtaagtctttcatttcccacgctgaatacttctttctaatacacattgaatcgactaccaatatggtgttttggaaaagcttaccactccaatttcatcacaagtctgtatagaccacattacttacaaaacttaaaatagagtttaaaatttgtttgacttatttcagaactattggacttcatgtctctcataagactgatgagaactaataatggaactagggctttcattataagcccatctttaggggaaagtcactggatagaatatctccaatttctctaattacattagaaaaaactggcaggggtatgtcccttaaggtacaaaaagatttcgattggctgtttttaatcattttctgattatagtattaataagataggttcaggaaacttttggatatgcccttccgacctaaacatttcttaacataaatttcacattgatttggccttttataaattgaacttcctttacttgtttcaaattaactatgacatcaccctaaactcccaaatcaccctttaaaagtagaaggaggacgaaatagaaccagtaatgtatgccagcaacttttaagatggaggctctgctgtgaagctctttacacataatgtttcatttaatacttgtgagaatcttcagaggtagatatcgttgtccccattttacagatgagaaaatggagatttagagacattaagtaactcatccagggtcatccacgcaacgtgtgcccaagaaacattttaaccaatgtctgactccaaattcctttcctagtatatgctactgatataggagttaagaataaagtatttaggcagatagtgagggtaaggaagtccttcgtaagactttccttttaataaaaagcagccccgaagtctttttcttttctaacaaagagcagcctgtaaaatcgagctgcagacatacacaagtgagctgtaagcttgcacgtgtgaatgttgacagttgtgacaataggaaaaggctgcctgggagtagacatgttcaaaatggcagctccatcttcccttttcctttccaaccatgtgtgcagtagggagcagacaacatggaaaccgccaggcaaagaccccatttgcataatataattagggcggagcaaacagcttccttgcagtctatgtagaaagtcacgcctggtccaaccaatctgtgggccctatgtaaatcagaaaccgactcctcaagcctgtctataaaatccgatgcactctgccacgaggcacaagtcccatttgggtgcacctctttctcacaacaaagagagctgttctcctttctctttcttttgcctagtaaacctccactcctaaattcattccttgtgtgtgtccgtgtccttaattttcttgacatgagacgatgaacctcaggtactaccccagacaatgatgccacttcactacagtagaggatattctaagaaatacttatttttactgtttggagatcatttaattttggggtggcgcaaaagactactgcctccagaaaactcttgcccgggaactccattactcagaggtggaaattcatccatacagtcacatgagccctctccctcattcttttctgcttactcacattactaaaggcacaagagagagacatcttggttcactaaaagatattagaaatctgacttgattttggtggaaacataaaaaagttaggcaaagatgttgacttccattgttttcaggtgaatcagatacacatataatgacacacttttattttaaattaaatgaagtcatttatagccatagtgcaaagtgacagtctgcattatgaaagggtaattccactagtaaattctctgcaatgagtttcatttggctgaacttttacaggagacaggtttatgggagattgtcttttatagagattccatagatccacccactgaaccaagagatgtactttcaagacctatgtttaaatttcatattgtagggacaacaaatgtattattctaagtggcttgactccagaggaatatcaactacttcacaggtagaatacaaatatcattctcactttaaatctgagtaaatagtcttaaacactttctaaatcctattatatgtacaaactttgcatgcaaaggttgagtcaagtcggcagaggagtataagtaaacacagccttctcccataagtacacagtattgaatgaaggagaaaagggctttatactctattccctcaatccctcaatcaaagaccttttagaagaaaaggcagagttaaaataataagcccagttctatgataaggaacttccgtatttgaatttcattgaattatagagttggaaagagcctcccggggatccgtgtaacaccagacctcaccccagatcaccagaccaccttctaacccgtggccttttgtgtgaatttcgtctcttcagtgtcaaaatactggaaactcgggatttctctgtcattctttcctgcagtgcgtttgaaatctgaagataacctattttgctccccatttttaaaaactgcatttaaaaccttgactaattgacagtaacctttaaggtggagacagcaaagtggaacagaaagagcagactcaggagtttgatttcttagtctcattttcctcatctacaaaataagaatcagtacagggttttcatgagaatcggaaatgatcaaagtcctggcatagttcctggtgcatggctgtgctcagtaagtggtagttattatgattattacagtcatccttaagcaaacagttcttataaagcacccccctaaaataattacagacatgtagcctcttcatctcctagcaatcttaaactatgttagaaaagtgctctgcttttggcatatgtttgtatatttgggttaaaacgtaaaacctcattccacttttttacttaaacatttgcttactgcaatttaatatcaaataacagttgccgttctgcggaaaacactctgcacagtgggactatgggggcacatggtcagccaagcaccattccataaagggactaagtgacagaacagactggatgtgagatggcaactgtacttcaggtacttttccaagaaagggagtttcttgacccaaaaaagataggcattttatcttaactgattttaatgcataaagaacctgaccaacagttcacacattcctcctggagagaagtcaggatgaggagattttaaaaaaaagctttccctacaattccaggaagaaattactcttctaggccaccaggatggtggtggtaatcgagcaaatgcatgcaaaccttgatgcaactgctaacttttaccaaaaaagaaactgattttctactgactgacttcctccgttttggctttaaagtcagccattaggcatctattgctgtcatattccccatgggtcttaggttggaccatctgttcttacaaacatcctaaaagaaacaataggccaggcacggtggctcgtgcctgtaatcccagcactttgggaggttgaggcaggtggatcacaaagtcaggagctcaagaccagcctggcctagatggtgaaaacccgtctctactaaaaatacaaaaattaggccggtgtggtggtgggcacctgtaatcccagctactcgggaggctgaggcagagaactacttgaacccggcaggcagaggttgcagtgagccaagattgagccactgcactccagcctgggtgacagagcgaggctctgtgtcaaaaagaaaagaaaagaaaacagtagtgggtacaatatagctggtgttcatgaatgatccttctgtgggccattgattcctgatggcctttcttccagttcttctgtgattctagacttagaagccatgagcttcagcatcaagtcaaggaagctctggaaatgcttgataacccaataggtctgaaggatctacatttgtcttgtacaaagcaaaattccaatgcctgaaagtgcctgacaacataaaggcattcggcaaggtgttaatgactgtggatagaataattcagatgtacctctgactgataagaaatattaaagtcttttttgaacagggctgttgtaatgtttaaatttcagcaaaataaacataagccctaatatgacttaactacagttcgctagaaaatcatgagaaatgcgcttccttacattactctggtgtttattgacctccatggcatgtttaacctcagggggctccttcatgtgggcataatctgagaatcctttggcagcatcatgtttctgcttgtaggccacctgaaaaacacaaataatttttagtcccatttagaggcatataaattcttgcctgctaatttcagtgttttgccaggactttatatatttgaataccaccactgatagttaatttgcctaaatctctgtaacaagacaatatccacaatgcattcatctttatgcttctgtttagattcctaattctacctctttgttgtttacttcaaaatgtccttgaccaaagatgaaatttccatttttattcatctagcttaaacctcgggtgtagttttgggaaatcatccatatccaagagctttctgggatatagatgtcagagatttaaatcttggaaaaacaactaagtagaggggaattataggatatttgaaagtaaattgttttcaaatgattgggtctgattttatgtaggcacagctataagataatataagcctcattaagtgcacaaacctttgggagaaaatatagcatgcaggcaaaattctcagatatgtcaagtcttggcctccattagggaaatggaccagtgccatccattaccaccatgttgaatttcctccatactaggatggagaggggatatgagaaagatatctcagaagtagatgtaaccaaactcaaccacaaagttggaaattaaagaagaacctaaagacagcaaccaagttatccccttggtctccactgatactattaacctatttatttccttcataatgtttaattactttgtttagtttatgtataattacttatctatcttcccttactaaacacaactgtcgtgttcactgaatcctcagaacccagaatagtgcctggcacaaaacatttgttcagtgaatgaataaataaataagtgaatgaataactaaaagaatgagaataaaacaataacaaatgaaggacagaaaggcaatattaattttaaaatatactaaaagcttaatactaaaaggatgttaaatggagttggaattacttgacatgagaaaaatggcaacttaagaaagacaaagtaggctggactcagtggctcatgcctgtaattagggaagtcaaggagagagacttgctcacgacaaagtgaggctcccatctctactaaatatcgaaaattaaccaggtgtggcagcacatggctgttgtcccagctacatgggaggctgaggcaggaggattgcctgatcccaggaggtcgaggctgcagtgagccacggcattctatcctgggtgatagagcaagatcctgcaaaagaaagaaagaaggaaagacagaaagaaggaaagaaagaaggaagtaaagaaggaaagaaaaaaggaaggaaggaaggaaaaggaaaagagaggaggaaaggaaggaaaggaaagaagcaaagaaaggagacaaggaaaggagaaaagaaagaagaggggagaggagagaggaaaaggaaaaggggaagggaaagggaaagtaaaagaaaaagaaaaagaaaaactagaacaggctttaccaagaacaaaacaagatctagttttcaatgaaaataatatataaaattaaatttaaggagaaagtttttaccaatatgagctccttgggcgcatgtctgtctcacacctttttatcctgtgcctaacatagtgaatgacagagtagaaatgcaataaatgtttagtgaacagatgaataaatgagtttactaaacattcttgtgagcttaaactcttcattggcttttataaacagtattaaccacccattccacttggataatatacctatctaaaggattaatgtgataagtcggatttttacaactaaagtcattgaatcttgtcatccaaaaaaaaaaaaatgtcatctggtataactaacaatgtttaatgccctctctggactgccatctagtttttcaaaaacttccactgaaagagaactcaaccttggccaccacagcctctaaattttgaaagttcagattaaaatttctttctttactgaaaccccaatctatctccccctagctgcgtctatgtggccttatgaaaagagcctatttcatgagacagaacttccaatgtgggaagacacccgtcactgacttctgttcctccagactcgcagtatggattaaagtgctgcactcctgaacaccttacatgctctcttcagcccaaatccgaatttatcaatctctttcttaaggtgctcacaatggttggaccattcttaattagaactgttagatttaatccaggttatcacctcccacatgttaaacattattaacacatccacggaccacaacatttttcttttgatggctatgctgagacttctgtcaactgatacctttaagtcttattcagtcctgcccagccatgttcctacctccaatcctgtggatttggttggttaccaaatcagaagcagcacctcacattgttccaaggataattcatcttgttagagtctgtccaccaacatactccatcaagatatctccctctggtgactgtatctttacaattttcaccaattaattatgttaagcaggaaaccctttaagaacctccattcaggtggagaaagtccattatctcagttctattacattccgtgttttaactcagaggtagggagaggaggagtttcatgggtacccaagtctacaaagctaaggaaaaacttctatgagatttgctccttcttcttaaatgaaaagaactagtatatgcctatttcctttttcatggttgcctggtttattttgtactttagacctactaacatatacttgtgactttataaatgtaaccaatgcagctgatcattttgtgggttatcacagaaatgatgagtcagcaagcacaattttaaaaggcactctttcttaaaaaggctatgtaattttctacttgcagcattaacatcgtcatttcatttacagccgctactaagtaccactttagaattaagattacatcaaattagagggagctgaactttaatttatcatattcattttcttccttaaaatagctaatggaaaattatgtcaagctaataaatttgccgataaatttgatttcttaggatttgtcattattgtatggtatttccctagattaatgctgttttcttcatactttgagaactgagattgccatgttactaggaacctggagacaggagtccacttgcaatagtcatatacactttgtttatataagtgataaatacatttattctatatttttgatcttacagcatattttatatttcatatgtatacagataaaatgtacatttatgtttcacttatagatttttttggcatttacttatttattcatttattttagagatggagtctcactatgttgcccaggctggtcttcaactcccgggctcaagagatctgcccacctcggccttccaaagttctgggattacaggcacgagccacagcatctggccaaatgtggcattgaaattgggggtttcacagatgccctgaagcttctccctgccctcgctttcagaaaattcatagatctctaaattaaagtttactggccaaggaggtcaagtatgcaaattaaaataatggctttgcctctgaaaagtatgatttatctggcaccttaattctacttgatggttatttatagtgtctaacaacatagcataagatgctacaaagacgatcagaataataacataacttacattatattttatatgacacaggtaaatgtgctgttaaccccatagcatagacacctctggacttctgaaacagaatcctgtgaccaccgtggatgaaacatagactctcattaagctgcagttccaatgcctgagtagcgtgaattgcttctatgataaggcattatttagcctttgcctgaaacagccctaatgagaaggatctcgccacctcatggcatggtccagttcattttcagaagctttctttgtaatctgtgcttataaaattgttaacaggggatagctaataaaatggcctcctaaaaactctacatctctctctctttttctggcatttcttcctttcaggcattttctgtaagtgttcatctagctaactttatcattctagtttgaatttaagcatctgagagtgtttgcaaattgactttaagataagtttgttttaataatttgtcaaaagttaaagagacttttcattagaacccagaatgtcattaaatttctgaattcatccaatactccgagttaggacatcacaaatctgatactatttggacactgtaaatgttagtcctttaattatcatagatactgtcaaatagttcttctactttcttgccccgcttattaggtaaactctaagaatcacaattttaacaataataaaatcgatgtacgtaaatctaaagaaatgttatgacagttacataaatctttgaagtagccgccttattcaaagtctaggtttttctttattaataagttcagtgactaattacaacaatggaaatcaatgctaattgtgagtacatatgcacctttcccagtggtgtctatttcagtataggataacatgctaacaatgtcagtgggaacctattctgacaaaacaaatgatagattccaaaatatacaacctggattatttttcatgttaagttctatgttgcagggatttgtgtattacagccctatttatgctataagaagttgagagctgttgtgtgctttcaaagaaatgaggatggaaacatcggaaaagttaccttcccaaggaagtataaaagcaataatagattgttttccttttctttcgttattgcttaattgttgcttgtcacatatcaagtgttgggttgtaattatctgctttttaaagtgacccacattatcagcaagtgcttaggtggccagatattggcaggaaaaataaagggcatattagtcacagtcacccatgcagaacgttgacatcatatattttaagctgcatgttgcataaccgagattagtttactgccaagtcaggtacacagtggacatttaaatgtgtaatagtgaaacacttaaaggtgttctgcaaagaataactatgctcagcatttttcaagagtaatgtattttcagactacttaaaaatagctaatgcatgctgggcttaatacctaggggacgggttcatattaaataggtgcagcaaatcaccatggcacacgtttacctatgtaacaaatctgcgcatcctgcacatgtaccccagaacttaaaaaaaattttttttaataagattatctaggtatctctacttaaaaagattctggggaaaggtagggcgcaatggctcacacctgtaatccctgcactttgggagtctgaggtgggcagatcgcctgaggtcaggagttcaagaccagcctggccaacatggcgagaccccgtctctactaaaaaaaaaaatacaaaaattagctgggtgtggtggtgtgcgcctgtaatgccagctactcaggaggctgaggcatgagaataacttgaacccgggaggcagaggttgcagtgagctgagatcaagccactgcattccagcctgggtgaccaagcaagactccatcttaaaaaaagaaattctggggaaagaagtaaactgcttgcttaacaagaaaaagagggttagaaatggtaggaaaaatatagcatagtgtgtggttaaaaacctagactctggggccagactgcccatattcatgtgccggcgctgccatttactggctgtgccaccttggccaactgacttaacctctcagtgcttcggtctccacaactctaatctggggacagctcattgggttgttttgaggactgactgggataaatacacgtgaaatgcatagaacaacttctgtgtgtttactattattaacctaaaatgtgaaatgaagaatacaaactatgtaaaaggaagcatatccttagaaagaaaattttaaaattccacaaaatccattttacaagtttttactgagcactctctatgtgccaggaactcttccgagcacaagaccagagcaaggaacgagacagatgaggtccctgctctcacgtagctgagagagctaaagaatagattaacaaaataacctccccaaatttgattgttctgtgaagaaaacacaacattaagatgaaccagaaagaggtgaaacattccatttagaaagtctgttttaggaaatgcaatagattaagaatgccttatgtgttgatatgctacaaagagaaaattactcctaaacccttctggattcaaaatgagtttacctgatgacaattcttaagttcctctgcaactggcaatcaccaaatagtaacttccacctgatgggggctatttttggtagcctgagatatcctaaaggaaaaacacaatctacagaaaaggaaattcaggaaacacttgtctaattgatgaagcagatctgtggatcctgaattcaacctttttttttttttttttttttttttgagacagaggctcactctgttgctctagttggagtgcagtggcatgatcttggttcgctgcagcctcaacttcccaggctcaagcaatcctcccacctcagcctcctgagtagctggcaccacaggtgcatgccaacaaacggctaatttttgtatttttggtagagaccagcttttgccatgttgcccaggcttgtcttcaactcctgagctcaagcattctgcccaccttggcctcctgaagtactgggattacaggcctgagccagagtgtccagccccattatctctttatgtggcttttaacaagctattcaaatattctctacttagggatcatatatcaaattagagaacagtttaatatttactataagaatttcatccatgtaagctgtctaaatgagattaagatttgctctataaattgcattgaatgggactcagaaaacagtaccatgtgactgacataaacctgcgtgtccttttcattttctgcaatttcaacagcaactactgacagcacattaatcagttgctttcaactttcatttggtatttaacacccatgatgaaaacgttttattaaaacgctaagtagcttttttccagttatatgttttatctacaaaatcatgaaacactttagaaaaaccctacctcactctggagctgtgtaacttctcctgcaaaaacactgtcaattgtggctggcatccgcttataaagagaattagaaaggtcagctttaatggtgcctttgtattttgcctgggggaaaaaaaaacaggaaaaaaataaataaataaacttccatttttttaaactgtgattataagtagaaaagaagaaactttctcccaaaacagaattgattttaaaatctgcagaccattttaattttagataccagagctgacaaactccaggattctgaagagatagaaataaatccaatttatcatagagaacgctttcaatgagacatgcaaggacataatggctttctatttaaatgcaagcacatttctaaaagtaaatctatttgtgtatattgacagtttcatgctggatgagtgagcaaacaattcgagttgttccagaaaatgcaagtcgttagaatctactatctagaacttgacaaaggacagtgttcttttattcaggtcttctcagcctcctcctgctccagggggagaggggagtgagtgcttttttgttgtttatgtgcctacccacctctagcctgcactgtctttaagccatctcagtcactactctaaagacaaacactctttcctcttgggaaaactaaggttcaagggaacacaatagattgctcacttccaatattttgctctgcaattaactccttcaggaaacataatcaataattgagaacatcaagtatttatctgcacgggagaatggaacatagctaagacaaacaaactatgttcttccattatctgcagatgagttcctgatgttcttcctgctcagagctagatttcagtattgatttattgagcacagatcctgtgctagccttctgctaccacactctttggattttggtacttaatgaaagaaaacgtactgatttcattcaaaattgtttcgcattagcagaaataatcccaaggacatccagttgatctttttccaacataatttatgaaacactagaggtcagtcatttacaacactatttcatttccgtttcttttcaaacgtatctcttctaagtgatctattcacagactacagtaatgcctcaccacagaaatcatcatcgttaacattgtgctttacaatgcaacataaactgtagttctaaatgctctcagaaagaaactacataatttttcagctggaaaatgaatatagcgtattcctcagtctgtgattttataataggtatcactgttgaactgaactttatcctactccaaaatagtttaaatacatttaaaattatttatcaaagatatcacattttagaaaactggtaaatcttatttatttccaaaatgatattcaatcatttatctctgatatatctattaggaaacaaaataatggaacttctaaagtgaactattgtgccagtgcttttacttatttaataaaaagatgccttttcaagaggaatcgtatataaataagaaagatttagagtcaaaatatagacatatataataaaatgtatgaagcatacatagtaaaatctgtcaatctatatgagttaaatgacagcgcatcacattagataattatgtagctattactaacattcagtagtgcttttgaaaatattattcttcatctctttaatgcacagactttcatctatataataagaaaaagataaatgcaagccagtttgcaagcttttgataccttacctcagaaataaaagcaccgatattttttacatggtttagcataggactgtcagtcacaaatgtacacttatccttggactttttaaactcttctttataacggatctaaaaaagagaatgatttacataagaagagaaaaagaaaaacaattctaatggccttttttgaatgataattaggttgataaagtccatttactgaagtaaatactcaagtgtgaaagggacctcaaaacaagccaagttaaataaacggctatccagcacaggattgcaaagatgatgaggcatagtgaggaaagaccattctttagataagcgagggtccagttaagcatcaacaccaggcgtgctggctacgggtgatgggtcctgtttacccagccagcccagtgcaattagcaagcatgtgccatctcgctcctacaagtgtcctggtgttttgttgcttttaagccttgacacataagcctttggccaaacagaaacacagctgcctacctcaaggtagaaaataagtagtcagcatgacagatgtgaccaattaagaagtagaggcgaaattaaatggggatcactattaccgttattacctagacatgcttgattagaggaagaggcttaaattgtggccaacgtgggcttcctgttactaattcctcccaatttatgagcacccataggcttcccaatcctcctcctgagcgcagagaagaactgaacctgcccagaaagcttgctatgtggtggagatcattccagaaggccttcttgctggagatcagcaagacaaagcccagtgaggcttagctaaacctgctcatctcttctctgcaactcacaagtcaaatgactcactctcttcccctttggggataggccagaattgttatgccgggggaagacccgggtggatatttgagcccaaaagaagtcaggaaatgtggagaaggacctaaagtataatcacactgtcacactaattgctgcacaatctggaaactgggaaggcaaaactatgactcattgagaagatgcaggtaatttgctaaaagttgtatcactctgtaatatgctcgtgtttatcctcccaagaccataaatacttaaactgaaaaagtgttcctgtttcagatgataaattatatgttctccctaattataacccaaaagtggagctgaattgtatatactacctggttcttagaggatgtgaataatattgatgttatacactaatggtacatggagattttcccatatgcaagcctgatttgacgggcattacttaacctgtggtagaactagatacagattaagtgaagttatttcaaaatcccatatttcactgctgtgactcttggatatcagatgcctaccacattaaacatttgctttattcatgaaatcaacacgagaacatatttatcttatctgagcactaaattacttttttttcttctcagagattagccataattttaggttcctgcaaatcaccctcctcagccactagtaattaaactgttaatggcagtatgataaatagtaggctattttgatcatatggagaaaaaagtatctccgttatataattaagtgtgagagaaaatagcctatcattaggcttaagtttgactcattatttttatcttttgccaccatctattccccatcacattcacattcttcactgcagtggtatgtgcttgtggctacagcctcctgataaagtctgacacatgcagaacgttcaggacaggaggactggataagggtgaggtatttacttcttctgttaggcagacaaatagctcagtcttaattgtagactctatttttttttcttgggtctttattaaaaagatacacatatttgtatattttaaatgaaggtgtatttaaaatttaagatcctttacaattgtacaattcaagagaaattgtacaatttgttagaagtcacacacaatcatgtgtgatttcaagtgaattgtgcaatatgaatgacaataagcaaagaatgttagatttttaaatacataaggaatatttatataaatattagatacatattagtagccttcctacaccaagataacaggaaatgatcattgaaagggaactatattggtcaatgaaacaaatcttaggtaaaataaaaatcactgaatagattgctatattttattacagccatgtctacatcttacaatttcgggttgacaccatctattggatagactggccactcccattatctcctattaaaagagcccagatggattaatgagagcagccaggctcctgcccagccccagaggacaagctgatctaaaccaggcatggtcatgccatccagtgtttggcctggggagccacactctctgtgactttagtggaaatcttcccagaagtgcttctagtgtttctggtacaaagggagagatgctgcacaaccctgtgacattctgtcttccacatttttctttctcaatcaaagggaaggcagcagcaatgatgtcattaccaaggaataagccaccatactaatgacgacagaatagaaggaaaggagcctgggagactgataacacccatagtacccagcctgaactacctacctccgggctttatatgtggaggctggggaaacaaaaacctacttgttaagccattgtgttagagttttcctgtttttacagtcatctgcactcctaccgaatacacaacccaacaccaaaagacaaaaagggcaaaattgatgactttatgatcattaagatgtcccaaacattgaccttctcttttgccctcacccacaaatcccacgtctccattacaattaggatgaatttagtgcagggtcgcttcctcctcctggccaagtttgtttgaatgagtatgagattagctaaaggctgaaatcggatgacagacatggagatgtttgcggatctttcctttcacaagaattcttaactgaaagtatctggaaaggctcttcacaagtgaaatcatacaagttaaattcaatacaccctggaaggaaaaacaatggctccatcattatttaactgggctggacatagctaagatcactctcccaggttttctgataccatctaagctttctctggaggagtaaccacagaatttaatgtttttggcattgaaaggatttacccacaacaacgttcatttgcctggaaaatattcttcctgctgccatgcagatgaacaccctaaacagccttgaactaaacactgagaggctgcatgcagatgtggtccacctgctctgcagaaggctctttctgcctaatctacaagaaacatacaaaagattcccttttgcccaatcttttttatgactccccatcagaagactactagatccaggattctgaatgctcaatagagaggataggtttaacttattcaagggattgattagataatgttaggttagactaacaggaataaatatgacagagagaatatctgtgaaaatatatctgagaaaataatagtattatgtgattaacagaaaaataaaagaggctgcctcagaagaccagctgttcttcaagactgggaagtgagttgtgcaaagaggaaccccataatgtgggtagagcaagtgcaaagcagaaactaggtggggggagaaagagaaagaaagaaaaatgccttatactgatgcccaaagtgaagccacttgacctgaaaaacggacatttctctctatggagaattctaagcagtgcaggcttcctagggctgatctctaggccaatcttgcttaacatttctataaaattgtctgacaaggggatgatatagcagtgtctacaggtctgctgactccaagctgtctcagtaagggaaacggcaaactgagatgaacttcagaagttctcaaagggccaggcaagagggcagaaaactacagattagatctagccctagtgtggttaaaataattcaaactattatttaaagatgatgggtcctaagctatcagctacaggtcagaaattaggaatgaaatggctctgatggtctacagattatcaagctgatctaacagctttctgcagctcccaagtctaagaaactcttcatagcatcataaagggtgctagaagctaagcaaaacatcatcctgctctacacgtgatctagaccgtccacatctgtaccactctgcacagttctgattattacatattggttattaaggatatatgaaagctggaagaagtccaaagagtaacaattaggctgcaccatgaagagaagtccatgaaaccatccctctcatctacagaaacgaagcagggccagcccggtggctcacacctgtaatcccagcactctgggagaacgatgcaggagaatcacttaaagccaagagcttgagaccagcctgggcaacatagtgagactccatctctacgaaaaagaaaatgaaaattagccaggcatggtagcacacacctgtagtcctagccacttggaaggctaaggctggagaatcacttgagcccaggaaattgagactgcagtgagctgcagtcacatgacagaactccagcctgggcaacagagtgagactctgtccagaaaaataaaaaagaagaaggaaggaaggaaaaaaaggaagaaagaaaagaagagaaaaaggaaaaaaatctaaaaattaaataagtatcttagcaagtatagaattctattcggaagcaaaatgtgaatgtgtatacagatataaattaagccagaataggccgggcatggtggctcacgcctgtaatcccagcactttgggaggccgaggcgggcagatcacgaggtctggagatcgagtccatcctaactaacacggtgaaaccccgtctctactaaaaaaaaaaaaaaaaaaatacaaaaaaattagccgggcttagtggcaggcgcctgtggtcccggctactcgggtggctgaggcaggagaatggcgtgaacccaggaggcggagcttgcagtgagccgagatcgtgccactgccctccagcctgggtgatagagcgagactctgtctaaaaaaaaaaaaaaaaaaaaaaattaaggcagaataatcatgtcctaaatttaagtagtacattctaccatgccacaaaaatctgtaataaacagaaagtatgcctatctgtttcattttacctacgtgggtgtgaaatgtatggatttagcttttgcataatgataaaggccaccacccctcacaacatgttggttttaaagtcactgatagacaatcttatccaaaacaactccaaccaaatcacctactaactacagttaccactttagtcctgatggtttatgtaacacaagttagctcagctataattgcacttcaataaaaatatatcaaagctggaagaggttaggaactcagggttttagttggtagcattactactaataatagtaacataataataataaggcgaagaacaacatttcatggaaatctacagggagagataacttggcagtgtaaagagggaggcctctgtgttcaactattactgcctctgcttaactgtgtgacccaggcaaggtactgaacctctctgtgcctctatctcctcgcttcagaaatgagaaaaagcctagcgcctacctcgcaagctgcaatccctggcacacaatagtcactaaatcttaactgttgccaatagtgttattgttgttgttgttgtcattgtcacttattattactgcaatttacagagaactttcacatacaatagctaatgactattaagtaatagcacaaagaaatacttaatttaaagggtaattacatcacatgtcaagtatatgggaaagggtatgatttccaccagcatcctttgtgcttgccttctggtttgtcagaaagagccagtcatatctaaattgtgattggatggatgtaaaaggaagtaacagacagagtagttaataacagctaacatttatggagtactcacaatgttccagatagtttattcagcatttatatgcattaccattatttaatcttattataaatgttacagctgagggatggagccaagccaggttccataaccttcccaaggttactggggagtcaacccaggcaggttgactttggaggatgtgccagaccactaccctcctgcccaggactgacttccgttagaaaacaaacgtgcaaaacattctgatcattttgcttattatcaacaacagaaacaaccagtattgtgctcatctctctaaatgaagacacaggcacatattcactttacaggagttaccctttctctggaccagcaatcctcttagaaccgctaatgaggatcatctaaattctcatccctggtgagcaacatttttccttgtacttcttgaattctagcttacatatttaacataaaattatatgttcaatcattcaataattctgggattcccttaaagtgtaatatcaaccaatcccagttactaaaaaatgtcacaacaaaaataccccttgcactaatatccttgcactaatatcagggttcttagcaagcaggtcagtaatcaacaaatcctgaattgtaaataaatattatatgcatatatatatatatatatatatatatatatatatgcattttcctgttctggaagacaagtccattcattagattgttcagaaggccccaaaatgttaaaaaaatgactattcatttagatagagggcctcccaagacaaattacatcattatattcattttaaaatctttgggggttctcaaatggaataaatactgcaattcaatgccttatgatttcatgccagcgtgacagcaaaactcataagggacaggattctggattaagaatgaggagacttgctctagcagaaattctctgtataggtgaccttggggaaatcactgaaaatttcaggactttgttccatgatctggaaagtgactgtgttttaaaaggtgatttcagggtttcccccacagctctatgactctataacataataataccacaggtgcaatgcaaaataagacaaaaattactccagccacttacatcgctaatgagttccgtgcattttctggccaattccatgcttaagtcttcaataacaggcttatagaagacctatttgaaaaaaaagaaaagaacagaaagaacatttttctcattgtcaatttagaggaacaaacgctggtctgagtatgtgttttctcactcacctggtcttcttcattttcttcttcccctatcttttcttcttcagtttcatcttttatatcctcaaatacagggaccctcatttttaccctttaaaatatttatatttttaaaatttactcatgtggcgtccttttccataccacagtgcccttgagatgctgacgtctctggtgctctggcagaaatgcccttgcccaagcctcagccctatttagcccacacttcactccttatctcagtggtgtgtgagtgaacagaaaaggatcccagaggtctaccaggctggcctcacaagtggaaataacatattcttaagcaaaatttgattttatgaacttttaaagtcaacattttttccactggttaagaaatccaaaagaaaaaatttatttatcttttactaattctattcattcataaaagagcataaaaaggacttagagattctgggaaaactactcagctctaacactcaagatagcacagtccaaagcctgttatctcaaagattccttgtctctgtctaaataaagctttcactggaatgtcagacttccttctgacttggggtagtgaatctggatcattcaaactcattttgtcaacctaaattatatgttttatcagacataccagtacttctcacatcctaaaaaatacccactttatattagctgattagaggctacttatttattatgaaaagccctttgaaccacttcaaagaatctattctgagttaattatgactgttagtattatactggcgagtatggtattgtattaattgtaaacatcattaaacatgagaagttgcagttaacatatgttgatacataatttaacaattctggaaacatcgtttcaaaaatcatcatcatcatctttgaattctgcagttctactcatcatgtcaatttttacaaagtcattggtgatttgcattattactcaatgggcaccccacattcagaaaagtttggaaaaataaaccatcacaatatttataatgtagtgtatgtccttggttacgtaaaaccaaggttaaaaaaaaatttctcaaaacaaatattttaatgtcaattcaggcaattccaagactccctacaactcacaatttattaatctggttatgtaaatcctagggtaaattaattttaccaagtcatagcacattagcattgggcataaaaaataccctacactgaatagtaatactgatgatacaaaatacaaatttattaaaaatagtatgtcattctaagtagccaagcataattttttctcttgatatcatatctagttttcaatgtactgtaaaaaaaaaatgccttggccttacctaaactgaaaatcctgacaagaaaaacattctacacagtcatcacgtataaattatttctgaaattgtgttccatgaggcaaaagttccacaaaagattctgggggaaaaaagcaggtttcttaaacaaatatgtttgggaaatctgtaccccagtctctgtccctgccacttagagatctacaaggcatattgacatactagaagttctgagaagaccttcaaccaaaaaacctgcttaggcttgcttaacctcgtgttcccctgaacacaaacctgtttatctcatcaaatctaatccaatttaatctaatctacctacctacctatctacctatcttttttttaatcatacccactaccccagaaaactaacactcctctgtgaaatatgaccgactgcttagggaaacattgctctattctcctaaaatgttgtgttctagaaggagctgttggtcttgaactagtttttgatacaggctaaattaatggtatcacatatcctgttcaccaacaaaataccaaaaagaaattgcctcaagcatgctgaacttggaaaccacaactctaagattacagccatatcatgctggcccagtgtagtggattccacaaggacattccttgtatattttatttgttccgtaaaaggaaagaatgtgtgcattccaattatttccctcaagtcctctgctggccagaagactattctaatattctatagatctattacattatctttatttggaaatagggaggagtaatttctgtaaacttgtcttgcaaatttctaggagtgtagggagaaaatcttgccaaaactgcctgagacacaccttttggctcatatttgaggagacagtactggtgttactcagggtgacacctattccccaaggtgaattaccttcatcaggcttgcagtgcagttatttctcatttcccatcacgtaatatgttcttagggactcttcactgtgctgcaagaaaataagctgttgagatttaatgcacaaacttttgaaaacaaaaaccaaacaccacgtgcaatgtgaacacaaattttccatttgagattctagaatcagaatttcaagccaaagggatccttaagaaatcaatacacctaaagccctctctttcacagatgacaaaatgaaggctatgaaaaattatgtgtctcatttacaaagccattcaatgaagcactaggatcagaacctaactagagacctgtgttcatttgttcaacaaataaatgttgttatgccaggcactgtgcttggtgttagagatagaatggtgaataaaatattcttcatactaagatagaattggaaataaaatactcatcactcaacacttgctggatgaagtctttaatggatcgtttggcaagctagagacaccattacttttgattgaatacatcttttttcctctcacctataatataaaattcatgcaaagttttctctaaaaaagtgttaagccctgcacttcatcacagcaaagttttcttgtcagtagctctaaaatatgacatggagaatatgaagaaagtgttcctcatggacagctatcatgtttcaaaatcccctatcgacttttccaaaaaccaagcttaatgtattttaatagatattttcaccttgggttgctccaaaaggcaaaatctctgtagctgctcatagcttttacttattgggcacttcttttatgttgtttacttttctactttagtactctacgcatgccttgatacagaatgagaccaagagacatcacttatggctaaactctcaaagtccaggtctggctctgccatgtcctctagggcaaattattcaacccctcactacctctaattcttcatagttaaacagaaaaactgagttgacagaagttaataaaaagaaagcactggctgggtgcgcagtggcacacgcctgtaatcccagcactttgggaggctgaggcaggcagatcacaaggtcaggagttcgagaccagcctgaccaacatggtcaaaccccgtctctagtaaaaatagaaaaattagccgggcatgggctgggtgcggtggttcacgcctgtaatcctagcacttcgggaggccaaggcaggtggattgcttgagctcaggagttcgagaccagcctaggcaacatggtgaaaccccatctctactaaaatacaaaaaaaaaaaaaaaattagccgagtgtgatggcagtagatgggattacgcctgtaatcccagctactagggaggctgagacagaagaatcgcttgaacttgggaggcgtaggttgcagtgagccaagatcctgccactgcactccagcctaggtgacagagtgagactccatcccgaaaaaaaaagaaaaaagaaaaaaattagccgggcatggtggcacacacctgtaatctcagctactcaggaggccgaggcaggagaatcacttgacccgggaggcggaggttgcagtgagccaagatcgcgccactgcactccagcctgggtgacagagcgagactccctcttaaaaaaaataaaaagaaaaagcaccttaaaaatagtggagcccctcacaaacacaagctttttttcaaccaccaataaaggtacacagtgatgtgaaaaacatttggcatgaaaaggtcttctcattctctgtgccattaatatccttttaaagtcaagaagggccttctgcaactagacagcttaaagataagagctcacttgcttatttataattcagaagtcttctgatcttttgatagcttgatgtttacacgtaagcaaatgtatttccttagcaactgtcaggtgggtaattcaagtctcagagacacagccgtggccaagggaacgtatctgtgccaccatctggagtcgtgcagtgcacaactgtcttcaccttccttgaggtcgcctatgacaagactttcttggtttttgactgtttcacacttatttcacttttttctcctttttttcataatgatagaacatgtacttttcctcaacatggtgatacatgatttaaaaataaaaatttataataaacaattaaaacagatccaaattcagttctgagtggggggaaaaaagtacagagataaactgcttttcttttaactttaaaaatgaattcaacatttcttattataaaatattcattccaaatggttaggtgaaagaagaatttgtttgcctgatttgtttccctgccatgatggttttttcacactcattttttgttgcctggtttttgttttgatgaccgtcttccggaaggttcctgcttctcagttgaatccctagtcattccatctttgcctcacctatttactcagtaactggtatcttcccagaacagaactttactgatggacgaggcaagataaatcatttcttgaaagaagaaatgtaagcactctaggacaatttgtctcctttataaaagagaagagttttgcttaatattggtccaatcaacttttacaatttagaattc

SEQ ID NO: 30 - DNA, 2054 bp, homo sapien
cgggaggcggcagcggctgcagcgttggtagcatcagcatcagcatcagcggcagcggcagcggcctcgggcggggccggccggacggacaggcggacagaaggcgccaggggcgcgcgtcccgcccgggccggccatggagggcgcctccttcggcgcgggccgcgcaggggccgccctggaccccgtgagctttgcgcggcggccccagaccctgctccgggtcgcgtcctgggtgttctccatcgccgtcttcgggcccatcgtcaacgagggctacgtgaacaccgacagcggccccgagctgcgctgcgtgttcaacgggaacgcgggcgcctgccgcttcggcgtcgcgctgggcctcggagccttcctcgcctgcgccgccttcctgctgctcgatgtgcgcttccagcaaatcagcagcgtccgcgaccgccggcgcgcggtgttgctggacctgggcttctcaggactctggtccttcctgtggttcgtgggcttctgcttcctcaccaatcagtggcagcgcacggcgccagggccggccacgacgcaggcgggggacgcggcgcgggccgccatcgccttcagcttcttctccatcctcagctgggtggcgctcaccgtgaaggccctgcagcggttccgcctgggcaccgacatgtcactcttcgccaccgaacagctgagcaccggggcgagccaggcctaccccggctatccggtgggcagcggcgtggagggcaccgagacctaccagagcccgcccttcaccgagaccctggacaccagccccaaagggtaccaggtgcccgcctactagcggctggcaggcacagaccagggctccaaggccaccccaccaacgcaggccccagggtctccgggacctcccttgggtccttccagctcagtgccgcggacagagtaggtggccgctttgcgccatccggggccaagagggggtggacccgcgtgtctgggctgcccctgccaagttcccccagtccctcagcacctggccccaggactgaggtcctgagaaggggatagcactgcccaggacgtgtgtccctagcctggaatggactggcctggggaaggctttcccctcttgggccacacctgctcactctggggttgggggtccagctgccctctacgatcaggtgcaggggctgcccaggacaaagcgggggcaggggaaagacaccaccctcgccccaagactggggatcctggccactgttcccatcccatgtccctgtgggtagtgactgtctcgtttctgtcatggtggtgcgtcccgtccggagccactctccactttctctcacaggctgctagaacagcccagccctgtcagtgttgtgatcatggtccagtcttcgggtttcacctcctagtactccacaagctgctcctctctctgtggccccggcccctgcccaggtgtgggtggttctggccaggaaggcacaaggtagctgtgggccaagacaccagccctgtcctagcccttcagtaagaccttgccaggagaggagaaggatgcctgggtgccaggcaagacaagcccctcagcaggagagaggcccagaggctccagctggccaccgtgccccacaagatggcccctgtgtggttccctttaccttggcttcctggcccagtccctgcctctccacctgcaccctgcttcctggcccagtcccaggttggagtccctctgcatagctgactactcatgcattgctcaaagctggcttttcacattaagtcaacaccaaacgtggttgccacatttcatcagacagacacctccctctggagatgcagttgagtgacaaccttgttacattgtagcctagaccaattctgtgtggatatttaagtgaacatgtttacaatttttgtatatatcactctctccctctcctgaaagaccagagattgtgtattttcagtgtcccatgttccgactgcaccttctttacaataaagactgtaactgagctgactgtgaaaaaaaaaaaaaaaaaaaaaaaaaa

SEQ ID NO: 31 - DNA, 6227 bp, homo sapien
cgcgccgccgctcgctcacctgcgctcccgcccgcccctcggtgcgcgcccggcccgccagccgccgccgcccgcaccccgagcgccaccatgaactcgctcttcaggaagagaaacaaaggcaaatacagccccactgtgcagacccggagcatctctaacaaggagctctcggagctgatcgagcagctgcagaagaatgccgaccaggtggagaagaacatcgtggacacagaggccaagatgcagagtgacctggctcggctgcaggagggtcggcagcctgagcaccgggacgtgaccctgcagaaggtgttggactctgagaagctgctctatgtgctagaggcggatgcggccattgccaagcacatgaagcacccacagggggacatgatcgccgaggatatccgccagctgaaggagcgtgtgaccaacctgcgcgggaaacacaagcagatctacaggctggcggtgaaggaagtggatccacaggtcaactgggcggcactggtggaggagaagctggacaagctgaacaaccagagctttgggactgacctgccgctggtggaccaccaagtggaggagcataacatcttccacaatgaggtcaaggccatcgggccccacctggccaaggacggggacaaggagcagaacagcgaactccgggccaagtaccagaaactgctggcagcatcacaggcccggcagcagcacctgagttcgctgcaggactacatgcagcgctgcaccaatgagctgtactggctggaccagcaggccaagggccgcatgcagtacgactggagtgaccgcaacctcgactaccccagccgccggcgccagtatgagaatttcatcaaccggaacctggaggccaaagaggagagaatcaacaaactgcacagcgagggcgaccagctgctggcggccgagcaccccgggaggaactccattgaggcgcacatggaggctgtgcacgcagactggaaggagtacctgaacctgctcatctgcgaggagagccacctcaagtacatggaggactaccaccagtttcacgaagacgtgaaggacgctcaggagctgctgcgcaaggtggactcggacctgaaccagaagtatggccctgacttcaaggaccggtaccagattgagctgctgctgcgggagctggatgaccaggagaaggtgctggacaagtatgaggacgtggtgcaggggctgcagaagcgaggccagcaggtggtgcccctcaagtaccgccgggagactccgctcaagcccatccccgtggaggcactctgtgactttgagggggagcagggcctgatctcgcggggctacagctacaccctgcagaagaacaacggggagagctgggagctcatggacagcgctgggaacaagctgattgctccggccgtctgttttgtgatcccccccacagaccctgaggccctggctctggctgacagcctgggcagccagtaccggagcgtgcggcagaaggcagctgggagcaaacgcacgctgcagcagcggtatgaggtgctgaagaccgagaatcccggagatgcctctgacctacaggggcggcagctgctggctggcttggacaaggtggccagcgacctggaccggcaggagaaggccatcacagggatcctgcggccaccactggagcaaggccgggctgtgcaggacagtgccgagcgggccaaggacctcaagaacatcaccaacgagctactgcggattgaacctgagaagacgcggagcacggctgagggcgaagccttcatccaggccctcccaggcagtggcaccacacccctgctgaggacccaggtggaggacaccaaccggaaatacgagcacctcctgcagctgctggacttggcccaggagaaggttgatgtggccaaccgcctggagaagagcctgcagcagagctgggagttgctggccacacacgagaaccatctgaatcaggatgacacagtgcctgagagcagccgtgtcctggacagcaaggggcaggagctggcggccatggcctgtgagttacaggcccagaagtccctcctgggtgaggtggagcagaacttgcaggcggccaagcagtgctcgagcacactggccagccgcttccaggagcactgcccggacctggagcgccaggaggccgaggtgcacaagctgggccagcgtttcaacaacctgcgccagcaggtggaacgcagggcgcagagcctacagagcgccaaggcagcctacgagcacttccaccgcggccatgaccacgtgctgcagttcctagtcagcatccccagttacgagccccaggagacagacagcctcagccagatggagaccaagctgaagaaccagaagaacctgctagatgagatagcaagtagggagcaggaagtacagaagatctgtgccaattcccagcagtaccagcaagctgtaaaggactatgagttagaagcagaaaaactaaggtctcttctcgacttggagaatggaaggagcagccacgtgagcaagagagccaggctccaatctcctgccaccaaagtgaaggaagaggaagcagcacttgccgccaagttcactgaagtttatgccatcaacagacagaggctgcagaatctggagtttgctctgaatctcctcagacagcagccggaagtagaagtgacccatgagaccctgcaaaggaataggccggactctggagtggaggaggcgtggaagatcaggaaggaactggatgaggagactgagcggaggcggcagctggagaacgaggtcaagagcacccaggaagaaatctggaccttgaggaatcaggggcctcaggaatcggtggtgaggaaggaggtgctcaagaaggtgccggatcccgtgctggaggagagcttccagcagctgcagcggacgctggcagaggagcagcacaagaaccagctgctgcaggaggagctggaggcactgcagctgcagctgcgtgccctggagcaggagaccagagacggggggcaggagtacgtgttcaaggaggtcctgcgcatcgagcctgacagggcccaggcggatgaggtcttgcagctgcgggaggagctggaggcactgaggcggcagaagggcgcccgggaggcagaggtgctcctcctgcagcagcgtgtggccgccctggctgaagagaagagccgggcgcaggagaaggtcacagagaaagaggtggtgaaactgcagaatgacccccagctggaggcagagtaccagcagctgcaggaggaccaccagcgccaggaccagctcagggagaagcaggaggaggagctgagcttcctccaggacaagctcaagaggctagagaaggagcgggccatggccgagggcaagatcaccgtcaaggaggtgctcaaggtggagaaggacgcggccaccgagagggaggtcagcgatctcacccgccaatatgaggacgaggctgccaaggctcgcgctagccagagggagaagacggagctgctccgaaagatatgggccttggaggaggagaacgccaaagtggtggtgcaggagaaggtgcgggagatcgtgcggccagaccccaaggcggaaagtgaagtggcgaacctccgcctggagcttgtggagcaggagcgaaagtaccggggtgccgaggagcagctccggagctaccagagtgagctggaggccctcaggaggcgaggcccccaggtggaagtcaaagaggtgactaaggaagtcattaagtacaagactgaccctgagatggagaaggagcttcagcggctcagggaggagatcgtggacaagaccagactgatcgaaaggtgtgatttagagatctaccagctgaaaaaggaaatccaggccctgaaagacaccaaaccccaggtccagaccaaagaggtggtccaggagatcctccaattccaagaagaccctcaaaccaaggaggaggtggcgtctctgagggcaaagctctcagaggagcagaagaaacaagtggatctggagagggaaagagcttcccaggaagagcagatcgcccggaaagaggaggagctctcgcgggtgaaggaaagggtggtgcagcaggaggtggtcaggtatgaggaggagccaggcctccgggccgaggcgagtgcctttgccgagagcatcgatgtggagctgcggcagattgacaagctgcgggcagagctgcggcggctgcagcgccggcgcaccgagcttgagcggcagctggaggagctagagcgcgagcggcaggcccgcagggaggccgagcgcgaggtacagcggttgcagcagcggctggcagcgctggagcaggaagaagctgaggcccgtgagaaggtaacccatacgcagaaggtggtgctgcagcaggacccgcagcaggcgcgagagcatgccctgctccgactccagctggaagaagagcagcaccggcggcagctcctggagggggagctcgagaccctccggaggaaactggctgcactggagaaggcggaggtcaaggagaaggtggtgctctccgagagtgtccaggtggagaagggcgacaccgagcaagagatccagaggctcaagagcagcctggaggaggagagccgcagcaagcgcgagctggacgtcgaggtgagccggctggaagccaggctttcggagctggaattccataactccaagtcatccaaggaactagactttctgagggaagagaaccacaaattacagctggagaggcaaaacctgcagctggagacccgaaggctccaatcggaaatcaacatggcagcgacggaaacacgagacctgcggaacatgaccgtggcggactctgggaccaaccatgactccagactgtggtccctggagagggaactggatgacctcaagaggctctccaaggacaaagacctcgagatcgacgagctgcagaagcgcctgggctccgtggccgtcaagcgggagcagcgggagaaccacctgcggcgctccatcgtagtcatccaccttgacacaggccgcgagctgtccccggaggaagcccaccgtgccgggctcattgactggaacatgttcgtgaaactcagaagccaggagtgcgactgggaggagatctcagtgaagggtcccaatggggagtcctcagtgatacacgacaggaagtctggcaagaagttctccatcgaagaggccctgcagagtggcaggctgacccctgctcagtatgaccgctatgtcaacaaggatatgtccatccaggagctggcggtcttggtatctgggcagaagtaggcacagctcttgcaactcttcgtaacggcagacgctggccctctcctacgacgcagtgacctccttggtgtcgtcctctccctagccctggtgcaggccaagcattttatacataccctcgctgccaggctgctcagagtcccgcccacatatgagacaggcactggctgaagacaggcaactctcgtcccaaccatcattcaccctgagtgacgtacttcatcctccaatgactggacaactgcgatgccttttcctcccttttcctgtacactcccagcaacaaactcctcatgataactgcacacaatctgaaaaccactgaaggacaagccaaccacagcagccaagcccactccttgcagcatgggtactggtggcacaccagacagtgacactgccccacaaaggcctgggcccgtgggggctgctgcctggcatgacatctctccagatttctggcttaaaacaactttccatccgagaagcctcctcagtagttactctgctcatgagacagatctgggctccaagccaggaaaggtgaacagaaaccacaagtgtccagccctcggtgctggagtggacgttaattgtcagccaccagactgtcccggcacctacagagaatgtttcacagttctggcatttaaatcctttgatagtggattgtgctgctgttagccttagtttcagtgctttacaagtctcgcttattatctcattggtatttaggtatacaaaacagttgattattcaccacgccaatatctgggtctctgtatctcatgtagaacataagaaaatgggaactaatagggaactttatttatagcatgaaaataaacctggtggctggagtctga

SEQ ID NO: 32 - DNA, 124048 bp, homo sapien
aagcttgtcactcatccatggtgtggttcaaactttcccttgtctgtgatgttcctgcaactagttctagatttttagactgcaataatctcattataaggtacagagctcattcaagaaggataaggggcatattgatttcctaaggatgattaacaaaacagcacaaacgaggtggcttgaaacaagagaaatttattctctcacaattcttgagggaagaagtccaaaatcaaggggttcacagagctgtaccccgagcttctggggaagatcccatcctttcctttcctggcttctggtaaccataggcattcctgggcttgtagcagcttcacttcaatctctaccttgtgctcgcttcggcagcacgtacattaaaatggaacttcaatcgctatccccattgtcacaagggggtcttccctgtgggtctgtgtccaaatttcctacttcttctaaggacaatctcgtattagattaagggcccaccctactccagtatcacatcttcgtaattacatctgcaatgaccctgtttccaacagaggtcacattctggggtactgagatgttagggctttcaacatatctctttggagaacacagttcaacctattaaataaagcatcccacaaaaccaaagtcagaaagcacagcagggttttgggatagaaagatagcaggagtcaacacagcctgtctctgtctttctgggagctcccggtctgtccttcctaagtctgtattgtgttctcaatctcttctttctttctctctctctctctctctcactctctctcccccatcttctcgctccccatctccctctctccctctctgtctctccgcccccccatgtattagtctgttttcacaatgctaataaagacatacccaagactgagtaatttataaagaaaaagagcggtcacggactcccagttccacatggctttggagatctcacaattatggcagaagacgaatgaggagcaaagtcacgtcttacatggtggcaggcaagagagtgtgtgcaggggaactcccctttttaaagccatcagatctcatgagacctattcactatcacgagaacagcatgggaaaaacccgccccatgattcaattacctcccaccatgtccctccgatgacatgtggaaattatgggagctacagtttgagatttaggtggggacacagccaaaccatatcaccctgcatatcagttttttctattgcaattgtccacaggccaaacatgactatattgtcaccaactttctatccccctctagtttcaagcaccttccagagataagctcagagattttcaactccaaatttctgggagagagtccacatggcctggctgtaatcccatatccaaccccttggtacacagccatggccagagccaaaagaatcctatggggttctggatctcctagggctctgggaagggcaagtttccgaaggaggaatgggggtggacaaaaattattggctgagaaaatagctggtgaacgagacattatttctggtagggaatgaatgcaagaggccactatgttctggagcacagagaaaactcccactggattctcaggaccgtctgagaggagaggaatttgaaagcagctgaattatcacaggagaaacagaatggagtcagaaaaattctgctttgtggcacttagatcaattctacgtctcatatctttgggagcatgggtggtttcccccaccctccattttcctcttctctctgaacaaaagttttagtttgtgaagtcaaatctcatctttttttttttttttttttttttttttgagacagtctcactctgtcacccaggctggagtacaagtggtatgatctcggctcactgcaacttccgtctccaaggttcaagtgattctcctgcctcaacctccagagtactgggattacaggtgtgcaccaccacatcttgctaatttttatatttttagtaaagacagggtttcaccatgttggccaggctggtcttgaactcctggcctcaggtgatccacccaccttggcctcccaaagtgctgggattacaggaatgagccaccacaccctgcccaaaccttgtcatttctgaaatagagtgtcagggtagtgtcttagttagcttgagctgctataacaaattataatagactgtgaagcttaaacaacagcaatttatttctcacagttctgggggctgggaagtctgagatcagggtgctggcatggtcagggtctggtgaggactctctcctggcttgcagatggctgccttctcactgtgtcctcatgtggtggagagacgggtatcatctctctcatatctcttcttacaagggcactaatcctattcatgagggctccaccctcatgatctcattactttccaaaggcctcacctcctgataccatcacattgggggttagacttcagcctatgaatctgagggcaacacaaccaatgtctgttagttcacggcagacagtgaaatagtggaaaggagggtgtgattgattctgggaagggctggtgttgaactctgactgcaggataaagccctcattggttctctgggccccggtaactgcccatctccccaagagggttcccacatccatttcctcccactctgggagtgagcccagcccagcatttcatcaacaactgatctcaggagccaaaagacacagggagaatatggtgatcagggagctgaggaagagggtgaaaaaaggcaaggggtgccaagcaactcaaccagcacttcccctccatcttctgctggatttgctcctttgtctccccagcaggtaggagggattgtccaagacaaagcattggttaccatctttctgtgccaaggctctgggagacaagactggattgcggtcctccttccttattgtacttattgtctaaccttaaggtacttccttatggtaccattttcacacgctgataaagacatacccccacaccccagactgagtaatttataaggaaaaataggtttaatggattcacagttccacatggctggggaagccttacagtcatagcggaagacaaaaggcacatcttacatggcagcaggcaagagagaatgagagccaagcagaaggggaaaccccttataaaaccatcagctcttatcagacttatttactaccatgagaacagtatgggggaactgcccccatgattcaattatctcccactgggtccctcccatgacacatgggaattatgggagctagaattcaagatgagatttgggtggggacacagcaaaaccatatcacttattctgtaggaagaaatgacttccaaggcattctccacccctgtctacatctgacagatagaattatatttaactatatattagtatattactatgacaataataactcatttattcctcacaccaaccctgtgctatccccgtttaaagatgagaaaacagaggcacagaaggtttgagtattatgcccaagatcattcagctgataaatgccatatccatctaactccaaatcccttgtggttgtacagtcagctgagctggcttttggataaaattggttggaggtgaatagagagaatgggttgggggaaagtggtggatgcccccagcaggtgtctcagaaataatgtgttgtcattttcactgtgaatatctcaggctcaagaataaaatcacttttctatataatgatttgcaatagtcatgattctttatgatgaaaatataacccaaatcaaacttgcctaagcaaaaaaatatatatataacataaaattcaccttcaagggatggggctggagttacccccggaagcaagaagaaaaattatgcagagcgcctggtatatccatcagagaccaccaatgtgttcctgtcaccccaacaggaagcagagaacccaaggctgtgttggcaagtagaagaccctagggacccagagggcccagagagcccagggattcccagtgcaaaccctcagatgccttggtgccttaaggaaaaacacaccagcctcatgctgcctaacttcagcaagaaaaaaaaggaccattcccttaatacaagcctcaattgccctgatgccttatggctgttattttagagaattataatgccacctatgattaataccgcaatgtggtcacacagcaaacgctcataagtaacctcccagcataaataccaagaaaatccagacttaccacggcttcatatacattttagatttttgctaaattggcccttgataaagcgtgtggccaccttcatcacagaaatcagcttcctccccaggcctaaaattagaagccccaactgccagtcgttaggtacagagctcaatgcctgctgagattcccctctcatttatcttctgcggggagcatttcaagttatcgccagctctcgtatcagctggcccggggaagggcagcaggcagcgagaggggcagctaacataggaagaggtcagcaggtgaggggtggctctggaggcggtggaactggctggtccctggaaagcttcccgctgcaggtctagagtggagaactcggactccaacagggaagattgtggctgggaagaattacagaccagatccagggctggattctgaatttagatggggcccgtaacaatttgcctaaatgatttatttcaacaatcaacacatccatatgctcagccactcagaatgatgactgaaataaaaatgaaaggtaacaggctgggcatggtggctcacacctgtaatcccagcactttaggaggccgaggtgggaggattgcttgagcccaggaattcaagaccagccctggcaatatagtgagactgcatctctacaaaaaaaaaaaaaaaaaaaaaaaaagaagagcaatagaaagagagaattggatgcatgctataacagcctatgatggtagatccagctggtctggggaaaaaggagagtatccaactaggcttccccaaggtcatgaatttttttttttttgagacagtctcactctgtcacccaggatgaggtgcaatggtgcaattacagttcactgcagcctcgaccttccaggctcacatgattctcccacgtcaacatcctaagtagctgggactacaggcatgcagcaccacatgcagctaattttttgtttttttttttcttttggtagagatggggtctcacttcattgcccaggctggtctctaactcctgggctcaagcgaacctcccacctcggcctcccaaagtgctgggattacaggtgtcagccatcatgcctggccagatgatgacatttaagctaagactaggacaatgaggagttatccaggtgtcaagtgagaggaatgcatttatacagagatagtaacatgtgcaaaggccctggggtgagaaggagttccatgtgttgaaggaattggaatgttgggaggaatgaaaagggtgtggcaaaatatgtgggctggggagggaggcaggggctagctcaggcaggatgagataaactctggtaagggttgtatgtgctcacagaaactcattaacacttcactgaatgctaatatttatttatcaggtttcagagtctgtttgttcgtgaggggagggttttccatcttctccacttgaatataaactccttgaaggcaatgacctttggttcacagttctatcaccagcacctagaacaagaactagaacaaaggtaaataaagacacccttatcaggcacaatgttgcaaagacttagtggttatcttccaggagccagtgaagggccagacctttcttaggaatgtgcaggatttgaactccccagacctgctgagtcaactctactgcaggggaccatacagagatgagaaagatgcgacattctttcacttctgggtagcagagtcaacaaatggaaccagggtgcccccaacgcccattacctatgacatcttcctctgaaataagctcaacagaagatggtccctggctacagtgacttttgtcagggatctccaagaccgccctcaggcccattgatttgccagaaggacccacagaatcaggaaagccattgtcctcatgaacattgtttattgcactaaaaggatacagattaaaatcaaccaaggtacaagatgcataggtctctccaagagagaccaggggtaagtttccagtagttttctcccagtggagttagaaggatagctcctaatgctctgtattagtctgttttcatgctgctgataaagacacacccgagactgggtaatttatgaaaaaaaaaaagaggtttaatggactcgcagttccacgtgactagggaggcctcacaatcatggcagaagagcaagggagagcaaagggatgtcttacatggcggctggcaaagagagaatgagagccaagtgaaaggggttctccttataaaaccatcagatcttgtgagacttattcactgccatgaaaacagtatgggggaaaccactcctgtgattcaattacttcccactgggtccctctcacaacacgtaggaattgtgggggctacaattcaagatgagatttgggtggggacacagccaagctataagagacaattagcaatgtatacaaagtactgccagccacagcagctcccccaagccttggtgtccaggggttttatcagcatttcatcacccaggcatggagcacctgcatgggtgacttttgttactcagtctccagcccctctagaggtcaaactgacacatacaaaaacaggcactcaccataaattgcattgttagcatggactagctagctcagcctgaggccataggtaaacaaagacactcttatcaggcagaatgttccaaagacttggcggttatctcccaggagccagtcaagggccagagctttctttggaatgtgcaggatttgaactccccagaccggctgagtcaactccttactgcatggggaccatatagagatgagaaagatgccatattctttcacttctgggtagcagagtcaacaaatggacgaggctgaacgaagacagtcaggtagaaccagaaaccacctccacctgcacccctgcataggacctaaaaaaatgtcataggaccatgacaacttttttgagacagggtctcagtctgccacccaggatgaagagcagtggtgcaatcatagctcactgcagcctcaacctcctgggctaatgctatcctcccatctcagcctcccaagtagctgggggcatgcaccacatctggctaattttttgactttttttttttttttttttggagagatggggtctcacttcgttgcccaggccggtctctaactcctgggctcatcaggagttagatgatcacccagatgaacaacagggacctcatccctccccaggggtcctggggtaggaccctcagcagatgagaggagtagctctcctggcccatacccataccctgttgtggtgtttataagcctgtcataggtcaggtttctagagagacaagctgtgggatggagatctgggtgcagggggtttactgggaggagcacctgctggaaagcaaggaagcagcattgggcagagaggggagtggcactgtggaacagtccccaggacccctgagacaccccctgtgatggttaatactgagtgtcaacttaattggattgaaggatacaaagtattgtttctggatgtgtctgtgagggtgttgccaaaaaagattaatatttgagtcagtggactaggaaaagcagacccaccctcaatctgggtgggcaccatctaatcagctgccagcataggtagaatataagcaggcagagcagcatagaagggcttgactggctgagtcttccagccttcatctttctctcgtgctggatgcttcctgccctcgaacgtcggactctgagttcttcagctttgggactcttggacttttgaccacagactgaaggctgcactgttagcgtccctacttttgaggctttgggatttggactggcttccttgctcctcagcttggagatggcctactgtgtgacctcacctggtgatcgtgtgagtcaatactccttaataaactccgctttttatatacatctatcctattagttctgtccctctagagaacgctgactaatacactcccatacggaggggcaagggacagagcctttgtaaccctccaggattatgggatgcctaggaggggaggaggatttcccagcactaggtggcttcctgcaggtgccttcttgccagaggcaggactttgctatgagctgttagcagctaggtctcccagcagctggggggacagagggcctcggtggtcctgcacagaggtctgagtggtatagcacccacagcgaagccagtgaccaaagtggaaagataaagatatgaaaatctttcaactaattaagatttaaaactcagattgatgtgaggatcctgaattgactgtttaccaaagagactaggttttaaatgagaagggtctgggtttacattgacttggcaagactgagtgtcctatcactggagtgacaagggaggctggtggggatggatccagggaaaagaagcaaagtatggaacaaagaagtttagaataaagaaagtggccaaggctgggcgccacggttcacacctgtaatcccagggtggccaaggcaggaagattgcttgagcccagaagttcaaggctgcagtgagctatgatcatgccactgcactccagcctgggtaacaaagcaagaaaaaaaaaaagcaagaaaggaagggagggatggaggaaggaaggaagggagagagggaaagagagagagaaagaggaaagaaagaaaaagaaagaagaaggaaaaaagaaagaagaacgaaagaaagaaaggaaggaaggaaggaaggaaggaaggaagaaaagaaagaaagaaagaaagaaagaaagaaagaaaaaaagacagagagagacagaaagaaagaaagaaagaaagaaagaaagaaagaaagaaagaaagaaagaaagaaagaaagaggcatcaaacctcacaggttgaggtaactgtaaatacacggtagtttatccctgagcacaaaatctcaatggcacagtcaaagccccaaagaagtaagaaacaaacatcatttccaccttttgggcctgaagaagcaggtacattagagaagggcagccacaatatctgtgaacagtcattaagctctcagacacagcatcccaccttcaccaatctgatctccttgaggggggtgatgctccctccaagataacaaagaaaacctggccaggcacagtggcccacgtctgtaatcccagcattttggaaggctgaggcaggaggattgctagagcccaggagttcaagaccagcctgggcaacatagtgagacccctgtctcttaataaaataagaaaaaagaaaaggaaaccttccctttacatgaaggcatcataccttaaatgcacatcccatctgcccaggaggctcacctctagatttgtatcctactgatgaacacacaccaagatggacatactagcataaattgtggagaatgacagaaaatatcctgaatgtccaccatgagggaactgattaatttatacacatccgtatactggaatactacacagctgataaaaagaataaggaatgtctatatggactgctatgcaaaaacctcaaagatatattgttgaatgaagtcaagatgcagtgtaatatgtacaatgggctatcatttataaaaccgggaggagacatatatacatatgtttttctatataaagattgtatctctggaaagtttcaagagaagccagcaacacttttgaccttggagaagaagaactggtggttgggatggaaaacaaacttaattttcactgtatactttttctggtactgtttaatttttttttttttaccatatgcacacgtttcctattcaaaagagaatttttttgaataggaaacaatgaaaaatcttataggcatacaaactaaattaattagccatccctatagcttcaacatgcatttcaatttgcaagcaccctggcctccaagattgattgattggctgtaaattgagaacctcagcaatttcctttcacagggacagatgttgacattattcctgtgatttttcacagatgtttcccttccagcatctttaaaatcgagttttctgtcaatttggaaatcccaaatttctcatatcaaatcgagatgacaggaaaatcaaaaccgttatcacattttgaaagagtttatggatggcaaatgacactgggaagggagatgtttaaggagcagccgacgtctcttaaccctttctcatcacttcctgcctcagtttacctaagccagaaaaaggggaaatttgattcaatatacagacaagggctttagagtctgcgtagctgtgcgatctcactttggctccaactgtctagctgtgatactttgaaccagttcattaacttgcccagcctcctctctctcatctgtaaaatggggataatatccccagccttgcagtgtgattttacaattcactgatgcaaaaatggaaaatgcgtggcacttagcaccacctaaatgttttttcctttttttttccctttccctcctccttcaccaatcctccaagcagcttttcttccttcttcatgtccccattttgctcacgagattccaagatttacccactgaagctctcatgagattcccagatttacccattgttgagaaatcagaaacatcccccaccccctagaattctcctgacctgtgtcccctccccttaggactctgctctccctcagtgacaacaggcaggaatatgatctactcatacaaaccaaacctctgctgtttgtacatcttagctaataatgcccaacacgcagccaacatttactaagtcaggctcttgagagccacttcatctgcatgacgccacaaaatcctctcagcaacaaaaaggcactgttattatttctgttttagagatgtggaaatgagcaccagaggtagatgtaacttgacaaatatctgggtggtagatctggaaatcaaagaaccctgaaccccaaccacagacacatcttcagttcaggctgggtctctacgctttgttatttttaacggggcattacgctccctggatggctatgatgctgcagttaactctgctcttgtggatgaatgcaattatctggggagctcgcacttataagatgtacagctatgggcaacctaaggcacatcgtggagtcttaatttcctcatctgtcaaatgagaatagcaaggatggcagggagggattaaggagcatttttggaaaaggaagtgctatgaaatgaacgtttgtgcctccacccccaaactgatatgtcgaagctgacaccctaattaccagtgttacggtatttgggtatttgaagatgcggctttggtgattatgtttagatgagatcataagcctaaggtcctggagatgtgatgtgtccatattagaagagacaccagagatacctttctctctctctcactcttgcttgatctctccctctctctcttgcactctctctcatgcttgcgtgctctctctctcccctgtgaggatacaacaagaaggcttccaactgaaagccacaaagagggccctcactggagaaacaaatcacccagcaccttgatcttcgaattcccagcccccagaatagtgaacaataaatgtctcctgtttaagccacgtagtatgtggtattttgtatggcagcctgagcagactgccacagtagatggttggtctttcctccaaccaataatagatggcttgtcctttccatcgcccaccttgggcaaggcaaacaggacagtgaaggcaagcacatctcacagacaccagcattcatgtgctaatgaggctcactactagtattgcaaagatgggaagtcaaacagaattatgtccttgcgaacatacaataacttggaaaattttattgaaagacattaagtttgcatacacacaaaaatgagtgaagagttttttgttccattgaataatttagaggacatctaagagaacacaagtttgaaatcttattatattttgtataatgatacataataatttccatgataaagctgatgtgtattgaggagatcatatgtgccaagcactcactgtgtgttaagcatattctattcattgtatcatttaatcctcaaaatattatcaccgcctgtattgattggggttttccagagaaacagaaccaatgtctaaacagagagagagatttcacgcaattatggaggctaacaagtgctgtcatctgcagggtgaggcagcaaactggagaccccagagaactgatggtgttagttccagtcctaaggccagcaggctcgaaacccggaaagagcagtgtttcagtctgagtacaaaggcagaaaaaagccaatggtgcagtttaaaaaccttcaggcaggaggaattctctcttacttcggaaaggaccgacttttgctctattcaggtcttccgtggattggatgaagtccacccacattaggaggggcaactgctttcctcaatctgccaatttaaatgacaatcatcccaaaacgccctcacgaacacacccaaaatgatgtttaggcaaatagctgtgcacctgtatccctaagagttaacacataaaacctaccatcccatcactctttccaaatagaaaaagtgaggctcagagaggttaagtcacttccccaaagtcacagagcttcttataagtggtggagggtttgactgaggacccatgctctattgtaatcatagaaaatcctagtggaattttccaatagaataaaacgcctgcccagctgcagccaaacgttccatagacaatgtctctgggccttttgtggcagaaaaaccaacataaggaaaagaaggctggagatgccagttttatcaaactcccataaggtaaagggaaatatctttctggggaaaggagactaaaggagaaaattaacagccacttttcagggagagagaaagagcagggacccagcccctctgagactgtgggctgggtgtggcctgagctgattggcagctccattgtaactatactgtaaaggaatgactctacccaaactgacctaaaggagagtttgaagcatttttaaaaactctgcccaggccaggcgtggtggctcatgcctgtaatctcagcactttgggaagctgaggcaggcagatcatttgagatcaggagttcaagaccagcctggacaacatggtgaaacctcatctctactaaaaatacaaaaatcagctgggtgtggtggtgcacacctgtaatcccagctctttgggaggccaagacaggtgaatcacctgaggtcgggagtttgagaccagccaggccaacatggtgaagtcccatctctactaaaaacacaaaaattagctgaacatggtggtggacacctgtaatcccagctacttgggaggctgaggcaggagaatcacttgaacccaagaggcagaggttgcagtgagccaagactgcgccactgcactccagcctgggtgacagagcgagactctgtccaaaaaaaaaaaaaaaaaaattctcagacaaccagcagtgatacaagagataaaaggcatctggctttacgctgcaaacaaaagggaaacaggaagtgagagagcagttggcctctaagaagcatccatttgttttaccctgccaggtgcctacaaggtgatggttttgcctcccaaatataatcaggggcccaatctctgcattcagagaagtatatttcagcaacccataagtaatccaaaagcagttccccacacatcagctcaaacagtgttacaggacaggcattcttggtgccatcagatccaatgtcccatgttttaaccaacaattgaaaagccctcttttttttttgagacagggtcttactctatagtccaggctggagggcagtggtgggatcttggctcattgcaacctccacctcctgagttcaagcgattctcgtgcctcagcctcccgagtagctgggattacagatgcgtgccaccatgcccggtacattgttttttttgtatttttggtagagacagggtttcaccatgttggccaggctggtctcgaactcctgacctcaaatgatccaccagcctcagcctcccaaagtgctgggattataggcgtgagccaccatgcccagctgaaaagctctcttttctaccctgaaaaaaaaaaaaaaatgtgctgatcctataacccatctactcttctaaccaatcacaattgtgccctaattataataaaaaggagaaatgaaatgatgaggatttctaatgaaataatatatagagaaatgatatgggtttccaccaggaaagacggagcgaagcagtcaagtgctcacacacgtgtgtgtagaataaccagtgacagtcacaaacgcagacagcgtggtgtgttgtcgcatcagctttactgagagtgccatgttcttcaaaagagtggctctttcttgataaattcccataccaaacagagtcaaatcttctcttgatttacaccatagctgctacattcttggaaacatcagtgttcattcaacacttacatgtaaaatagaacatgtaaacatataaaatagaataggcagataaaatagaagaaggttggaccgggcgtggtggctcacacctgtaatcctagcactttgggaggccaaggtgggccgatcacaagatcaagagagcaagaccatcctggccaacagggtgaaaccccgtctctactaaaaatacaaaaattagctggacgtggtagtacccgcctgtagtcccagctactcgggaggctggggcaggagaatcgctggaaccagggaggcagaggttgcagtgagccgagatggcaccactgcactccagcctgggtgacagagtgagactctgtttcaaaaaaaaaaaaaaaaatagaacaaggttatagactctgataatcatggttcttctaacccatatgaatttgggatctacacatatatatattcaaaaaactaccccacaccgtaatgactcccccatccctatcattagggcaaccaaaagctctctgcagatttaaaacacacacacacaaacacacacacacacacacacacacacacacacaaacacacacacacacacacacacaaacacacacacacacaaacacacacacacgggacaattcagtccccagtgagaacctctgtaataaaaggtccaattcctaacccgcaataatattctttttttttttttttgagacagagtctcgctgtcgcccgggctggagtgcagtggtgcgacctcagctcactgcaagctccgcctcccaggttcacgccattctcctgcctcagcctcccgagtagctgggactacaggcatccgccaccatggccggctacttttttgtatttttagtagagacggggtttcactgcgttagccaggatggtctcgatctactgacctcgtgatctgcccgcctcagcctccaaagtgctgggattacaggcgtgagccaccacgcctggcccacaataatattcttaaagtcccctttcccgcctcctcagttctcccacaattcccagtttccccagaacaaaccccaagagatttctctgcccttccccccacccccaggcagagatgtcttccaactcttccccagcactgtaactctccactctggtcaagtggactccaccttggggaaagaatgtttgtaccgggcaccaaactagactttggagatacactagttcttagtatctgctagtgtgataattaaggtaattatttagaccaggaatctgcaaaatacagcctgaaggccaaatccgagctgcttgttttcctatggcctgaaagctaagaaagaatggttcttacattttatattattattattattattattattattattattattattattttgagatggagtctcgctctgtcgcccaggctggagtgcagtggcaccatctcagctcactgcaacatctgcctgccaggttcaagcgattctactgcctcagcctcctgagtagctggaattacaggcacctgccaccacacccggctaatttttgtatttttagtagagacagggctttaccatgttgtccaggctggtctcgaactcctgacctcaggtcatccgcccacctcggcctcccaaagtactgggattacaggcatgagccactgcgcccagctagttcttacattttaaatagttagtgggaaaaagacaaaaggaataatacgtcattacatgacaattatatgaaattccaatttcagagtttataaataaagtattgtctgtggctgcttttgcactacaatggcagggttgcatggttgcaagagagcacatggcccccaaagcctcaaataatccactatctgggcctttacagtaaggttgtcagcccctggcttaggcactaaacaagtgctttcaagcacctactatatgccagacactaaggtaatagagaggggagacaatcaacaagaagcattctttctcaaaagttttaggctgggcacagtggctaaagcctataatcccagtactttgggaggtcgcggcaggagggtcaattgaatgcaggagtccaagaccagcctagacaacatagtaagaccccgtctcctcaaaaaatgcaaaaaaaaaaaaaaaaattagttgagcatggcagtgtgtgcctgtagtcccaggtagttgggaggctgaggtgggaggatcacttgagcccaggaggtcaaggctgcagtgagccaagccatgatggtgcaatggcactgcagcctgggagacagagtgagaccctgtctcaaataaataaataagtaaattaattaattaattaaattaaaagcatgttattcagaatcacatagacttgggctcagctcttcagccataagcatgtttcttttctctttttctttttttttttttttgttgagacagagccttgctctgtcacccaggttggagtgcagtggcacaatcttggctgactgcaacctccacctcgtgaggtcaagcgattctcctacctcagcttcctgagtagctgggattacaggcacgtgccacgatgctcggctaatatttgttttcctttttttttttttttttttgagacggagtttcgctctttttgcccaggctggagtgcaatggtgcaatctcagctcactgcaacctcctgccttccgggttcattcgattctcctgtctcagcttcccgagtaactgggattacaggtgcatgccaccacacctggcctaatgtttgtatttttagtagagacagggtttcaccatgttggccaggctgatctcgaatgctgaacctcatgatctgcccacctcagcctcccaaagtgctgggattacaagcgtgagccaccgcgcccggcccatgagcatgtttcttgacctcagtttccccttctgtaaagcatggtgtggattgttcacctcgcatgggcatgtgaatatcaaatgagacatcctgtgcaatgtgcctcagacaaagaaaggagatcagcaaataatatttcctttctagttcatcctctcttcccatgtatgccaagaaagcaggcgagattgagtgagggaggtcatatcctctttgtctaaatgttttcttgttagagaacatctttcttcttaacatcccttcctacataaagaatctctgtcagaggaatattaaaaggccctaacctacagttagatggaaggcgagactccgatctcacagctgaatcactttagtctacctctctacccatctaatgctatccccttcaaaaataataataataatatgaaagttgggaagtggaaaaccatcctctggagttttcaaaaactaattccgttgtaatcatagaagactgaaggcaggattcatgacacatttctcttcctcctgggcagatgaatctacaatttgtatttgattttaaatgtgattctcctgcatcttcagtgggtttgattgatagagcacatggggccactcagtaaaatgatacagtggagatcaaagccggaaagataatttttgccaaaatgtctgcagccgacagtgagttataagcctttgtctcccactttacggaacacaattttatttaaagccgaaatctgtcactttggtattgtttattgaaatgcatcccataccacggtcccgtgaagaacaacgtcaagtcaaaaggtaaaaaaatccaatggttacaaacagcccaggaccaaataaaggagggagaatgcttccaatctgcgtaaatattacccaccagtgatgcatttggggcaagcaatgaagtcattcatctgcaaagtaaatatctggcattgtcagaggtgcctgacacagccccataaacccagtgagttctgttccattcagcagctcacacatctctatttgataactttgctttatttatgggtccacaatgggagtcataactgggtttttatctttgcacaacttttttactttattttttgagacagggtctcactctgtcacccaggctggaagtgcagtggtgtgatcacagctcactgcagcctcgacctcctgtgcccaagcaatcctcccacctcagcctcccaagtagatgggattacagaaatgcacttccacaccttgctaatttatattagtttttgtagagacgggctctccctaggttgctcaggctggtcttgaactcctgggctcaagtgatcctcccacctaggccttccaagtagctgggactacagatgcacaccaccatacccagctaatttttaaattttttatagaaaaggagtctcactatgttgcccaggctagtctcaaactcctggcctcaagacattctcccaccctggcctcccaaattgctgagattacaggtgtgagccactgtgcccagcttgcacagcttttttaaaccttttttttttttttgtattcattcacgcttttcatacatcatgattgaggatctaccctgcagactgtatggagttatctagaaggcaggaaggcagagaactaaaacctttggttaaaatatctggggttgagctcagtgtttcctgctctccagctatgtgaccttgatcgggtctcttcacctgtctgaacctcagtttccccactgcaaagtggagagcaaatgagaccatggacttggaaatgcttcatacatttctgagtgcctcacagatatgaagcccaaagatagcaccattctaggctctgtcaggacaatgaggccaaagttgtcactgatgccataaagttgtctctacagcgaaaggtccctggaattagcaggaggcttttgtggagcaaatgcctccttttctgcgtagaaagtgagatgcctcaatcactctgcctagatgcctctagatgcctcaattcctctgccaccaacagactctgtgacattgggtcacttttgagattcctgggtcctgcctacttcaccagaatgtcatgttctggaaccttctcagtctccaacctcatcactcacaagcttttcttatgctttgatagatgctacaattgcttgtcaaaaaaagagcctcatcttctccgttgctaagagaaccccaatttttaaagtattgaacagtcacatgctttaggagaagttgcccttctgagcctcaaggagtgaatcttgactgacctaaactaatcatagtaatactgaccccctgtctagtgattgctttcgaataggcacgtgacccattgtgaccaatgagagttgatggaaatttcctccttgctgtcaacaatggacacaaggaagacacattttctcctctgacctttggacattgaacgttattgtgttaggatgtgatgtaaggcactgtggcacccattttgtgctcattagaggaaaagactggaattaagcccttgctctgtaagtcagagcacaaagatggcaagagcccaggtctttgatgatacaactgaactactgaataaaccaaccctagactcacctacccccaaattccttttaatgtgagagaataatgtcccatcttgtttaagcaatttcaggtttccattacttactaatgaatatatttggattccaagttgttatttccttgcatggaatgcttctgacacaactcacccttgctagcctcaagggtggtggccgaactggggagggtccaagaggaattgcaaaaaacagagctgcaaggagcagccttatctctgaccgctgtggtgagccctccactttgtataccctcccccaaccgtgtgactctggatcagccaatcaggtgatctctcttggcaccttgactcatgatgcaagaacacaggccctattgggtttccatgaattctctgcagggagagcaggggtccccagatcagcctatccctaacgcatgcccttggaggagttgccactataaagctatctggagtcaccttgtatggggtgttttccaaggctgggccttcagcagtgccttcggcatgttctctttctttggtaagagtcagtttctggggtgaacaactgagaactcagggacatagacaagaaatcatgtctcattcttaaaagcctcagcacaagtcctggcatagagtaagtgttgatgggaggttggatgaatgaataaaggagtgagaaagttaattgcttcccttctctgggctgctgtatcaatcaaggttgtggcaggaaatacatagtaaactgaaatggggtaactaaaaagagtttagcaaagggctatatatagctgtataagtgggattaaaaaaaacaaaaacaaaaagggaggttgcagtagccctaactagcagcagtgaggagccatttctacccctagacctggaggggaaatagttatggaacccaaggagagtagccacagtcttcagggaaagacagctgcctggcaggagcttccaacctatggcaacccaacaggaaggagccacagaaataaatatccgaatccctctctcctcccaccttctagtattctatgatccccaccccattggccaaacccaagcagccacaagaggatgggagaccacatgtgatgtagtccatagaagtcagcctcctggggtacaaagcaggaaatgggggtggacagtggatgtaaaggagcaaatacaaaatatccggcacagatattgctatggtttgcatgtgttccccaaagttcgagtgctggaaacttaatccctgatgcaaccgtgttgagaggtgaggccttcaagaggtgtttggatcatggggacatcatctttctgaatggattaatgcctttatcatgggagcgggctggttttcacaggagtaggtgctctctctcaccctctctctcacccatgtgatgccttgggtcacaccatgatgcagcaagaaggccttcaccagatgtaagctctcaacctcggacttcccagcctccagaactgtgagccaagtaaatttctattcattgtaaattacctggtctgtggtattctgttatagcagcacaaaatggactaagacagatagtatctagtgataggatagactacaagaatctctttcacccagatcctgcagccacaaaagggccaacgctctttggagagtttatctctcacccaagcagccaccagcatcatcagaaaacagcaatgttcctctacacgcttgtgtgtttccttcattggtacaagtttccaccattgttttgctcataagagaaaccattctccaaagcccagagtaattatagagcccataagtcttggggctttctgaatttgaagcagattcagggctcaagagagccaagaagtcatatcaatgccaggaatctggaccccaggcagacagcgtggataacctaccccaacagaggtgcaggctctcttcctttcacccaaaaaatagcaaacacatttattgatcaccgtgggccttttccttccacctggaggttagcaggaactttcaaaggtttagtgtcatccatatcccattgtcttcttcatgcacagaaaagacaaacttcttcatctctggaaaggagacatggactcacactccccttattctgaatttttgcccactaagccatttcacaggaagttagccatggtttgtggatttttaaatgcttctgggaggagaaggatttactagtgataagaaataaaaatgcaaatgttttactgatgagatatgcatgtaaagtgcttgatataatgcctgacatggaaaaaacactcaataaacgttagtcatcagtatttatatcatcattccttttaatacacgccatcgactgggtgcagtggctcacgcctgttatcccagcactttgggaagcagaggcgggaggatcacttgagcccaggagtttgagacgagcctgggcaacataagaagaccccatctctataaaagaatctttaaaaattacctaggtatggtggcatgtgcatacagtcccagctactcaggaggctggggtgggaggatcaattgagcccaggaggtcaaaatgaggctgcagtgaaccatgatagtacaaaaaaatagttagaaagaatgaataaggccgggcgcggtggcttactcctgtaatcccaacactttgggaggccaaggtgggtggatcacgaggtcaggacttcgagaccagcccggtcaatatggtgaaaccccatctctactaaaaaatacaaaagttagccgggcgtggtgacaggcgcctgtagtcccagctacccaggaggctgaggcaggagaattcctggaacctgggaggcagaggttgcagtgagccaagatcgcaccactgcactccagcctgggcgacagagcaagactccatctcaaaaaaaaaaaaaaaaaaagaatgaataagacctactatttgctagcacaatggggtgactataatcaaaaacaatttaatcgtacattttagaataactaaaagagaataattagattgtaacacaaaggaaaacgcttgagatgatggataccccatttagcctgatgtgataattacacattgcatgcctataatatctcacgtaacccataaatatatacacctacgatgtagtcacaaaaactaaaactaaatataaaacaacaagcatttatcatctaattgtctggatttggaacccacaagccaactcagctaagtgctctggcttagggtctccaatgaggctgcaggtaagatgtcagccaggactgcagtcatctgagcgtttctggggctgaagactaggcttccaggctcactgtgtggttgtctctattccttactggctcttagacagaaacctcaattcctcaccacgtgggcctctccataaagtgccttagtgtcctcaaaacatggcagctggcttcctccaaagcgactgatccaagaaagagaaagaaagagccaacaatggaagctgcagtctttcatgacgtaatcgcggaagtgacataacatcacttctgcggcattggtcacacacgagccccaacatggatctttccagcgtgggaggggactaaacaaggtgtgaatggcagcaggcagggattgttgcgggccatcttgaaaactggttccctcagaggagagctggaaggctggggacaaggacacaagagaggcttttttatttttttatttttttgagaccgagtctcgctctcgctgcccaggctgaagtgcaatggcgcgatctcagctcactgcaacctccgcctcccgggttccaggaattctcctgcctcagcctcagcagagttccccaagggtacctgttggcctagtttgagactcttggctctgttagtgggagtctcaaactatgctccaggctgctgattgttctgagggatttctctctctttctttctaacactaagaaataggaacttggcctcccagagtgctgggattacaggcgtgagccaccacgcctggcctgtctgtaatctttaaaagtaatagcatattagctctgagggtcggttggattttcttttttaaacagttggcagtcatttgtagccaagtcaggtgaaaagggtaggtgatcaagctcattacaatttttattgaaataaaatttatctttagtaacgagattgattttttgtgtgtgactccggagggcagtttgcccagagcagtggttttcaaactcttaacaaactatccctgagaggaaaagagaatgaattcatactctgtggagtgtagcccaaaataacctctgcaaaggtgaaattttctttgaagtcttattttaccttaggtatttgtgaactctgcgttctattttgtgccacatgtgttttaagttactattactctactaaagtttattcatcctccaggaagatgatgatgtttgtactgtagttttttatgtcccagggatacagcagggttccccaagggtatctgttggcctagtttgagactcttggctctgttagtgggagtctcaaactatgctccaggctgctgattgttctgagggatttctctttctttctaacactaagaaataggaaacacagttttcagtttaaaaataacataattacaaagtgtagaaaagtctctcttggccgggcacggtggctcatgcctgtaataccagcactttggaaggccgaggcgggtggatcacgaggttaggagttcgagaccagcctcgccaacatggcaaaatcccatctctactaaaaatacaaaaattagctgggtgtggaggcaggcagctgtaatcccagctacttgggaggctgaggcaggagaatcccttgaacccaggaggtggaggttgcagtgagctgagaatgcactactgcactccagcctgggcgacagagcgagactgtctcaaaaaaaaaaaaaaaattacaggcaaaagaggttgcccatgttctcatcattggcagcagcagcatcaaaatatggcacccactccagtgatgcctttccagaaggagcaacactcatgtgaaaccaccagctttgctttgtttttgtttttgttgttgttgttttttcagagacagagtctcactctgttgctcaggctggagtgcagtggtgggatcatagctcactgcagccttgaactcctgggctcaagcgatcctcctgcttcagcctccccagtagctgtggctacaggtgcacaccagcacgccttgctaattcaaaaaaagaaaaaaaagaaaagaattgtagagatggggtctcgctatattgcccaggctggtctcaaacttctgacctcaattgatcctcctgccttggcctcccaaagtggcaggattacaggcataatccagccattgtccctggcctggcttttttttttttttttttttttaatgtagctcatgaccacaaacggagtttggtttccttgctctctctttttcccatttggtacttttctttctctcccatgcactcctcttcaaaccaaaagtgaatcttgttatttcttgaaaaatgtgtagatgttgaagggatgaaaaacctgaactctaacgtctgactatctgaacccaaattctagccgccccactcagttgctgtgtgactgtgagtaagttcttaccctctctgagcctgtttcttcacttggaaaataaaagtatacacatatacagctgttagccagaactcagcctagggtaacctttcaataaatattagcatcatcaaggaaatcgcttgacaaattaattttcattaagcaatgagggtctataacagtgatgacttctgaccaaccaaccagcccaatggctgacaaaggactgataacactttacatttttataatttccctagatttcaaattctccataaggagcaagtacagtttttataatcagacatagaactcgcgttcactctgctcatcctgaccctagccactggccaccaatttctgggttggctgctccaacctgagagcacagctactggaatcagaggcagaggagctcctcttgcgttcgttgttggtttcccttggttttgtaaaaataaataaataataaaatagggatacacccttcagacagcaggtaacttcctaagctaagatgaacaggaggaaatttaaatgtctttccccggttcaaatcccctaccctctcccatctgcctaccctgggctccaacactcgggagaaagaccataagtcgttcagatgatgctttggagctggacaatcaatcgtgatcaaaaacaggggcatgggagcctggctaacgtggagggatgggagaaaatcaggctgaattagagaagggtacattgtggagtgtgttttacaacgccattagttctaagcacataaggatttcaaatcaaggagcatccacacacacacaaactcttggattccttaagagataaggcggatccaaaattagcatatagatcagaggcatgcagttgagtgctgctaaagtgggctataaatgcttgggggaaaatagttgtttttctgaagaaactttacaacattccaaaatcttgtccaggaagtgtgaactctaagtccaatggactgaactgtgtcccctcaaaattgatatgttgaagccttaacttccattatgatggtattaggaggtgggcttttttggaagactattagtttagatgagatcatgaggatgaggtcttcgtgatggaattagcatccttacaagaaaagacaccagacggcttgctctcttgctctgtctctcctcttccctccctccctctctctctccctctctacctccgctccccccaccccccacttcctccgtcatgtgagaatgcagagagaaagcagctttctgcaagccaggaggagggtccgctgggagctacatcagccagattgtggcacttctcagcctccaaaactgtgagaaatagatttctgttgcttaagccatccagtttatactattttgttatttgcagcctgatatggttcggatttgtgtccccacccaaatctcgtgtcgaatcataatccccagtgttggaggaggggcctgggggaaggggattggatcacggggacagacttgccccttgctgttctcatgacagtgagtgagttctcacaagatctggttgtttaaaagtgtgtagcactttcccctttgctctcttcctcctactccagccatgtaggacatgccagcttccctttcaccttctgccatgattgtaagtttcctgaggcttcctcagctatgcttcctgtacagcctgcaaaactgtgagccaattaaacctcttttctttataaattacccagtctcaggtatttctttataacaatgcaagaagagactaatacacagcccaaactaactaagacaaacccactctgacccattctgacacccaaactaactaagtcctggtttgaacccttcactattgtgtcaccttggggcaagtcacccaacttctccaaatgtttgtttcccaccaggaagatggaaatgacagtacctctccttcctaccccgcaaacctatcaggaggatcgaaagggacatggcaagcaaatactttctaaactgtaaagtgctgtgcaaatgcaagacagcattactctctttttatggagttatttatactctacctggttacagcagaggatttatggtagatgtcagtaagactctttattttgaattttaagagagaaataagaatctttgttatctgtagagaaacaaatataatttccatggggcactaatataatataatataatataatataatataatataatataatataaatataccttaccgaataaaccctttgctcagacgtagtgaaaaggtaaattccccttcaacctaatgaagtttcagtcgctcacattttctgaatttgccgaacagaaatgcgatcaggtgcctactaagtgcagtacccagcacgatgtctaacattgaaacatacagtgtatacaccagcacctccaccaaacccatatccagcatgcaaaacatacccttttcaagtcggaagcacatagatagattttttggagttcaaaaggtcttaatgcaaactggctccaattccttttttttttttttttttaaatctttgaaacattggttaagtcttctcagagctatcattttgcacacatggaaactttagaccatccatccttcaagtgtcttggggtaattagagatactgaaggttaaggacctagcatactactaatagattttcaacaaatggtagctactgttatttctcatcattgcagatttaagagtgccaattctcagagcacttcagataaaaaccctacctttcttaaggcaaaaaacaacggcattaacttttttttttaattaacctaagttcccattatgtttagagaagagatcacaatgataaatgcttgccctgtctctcttttttaaaaatttactgttcttacatgtgacatatactgtggtacttagtgtcaccctacaaagaataaatttaaattgaagaaacagaaacacgggagagtccttgtttgggtttaatttgtatctgactacaataaaattctatcctggaagctagagtcataaaactaaaagtcaggaaggaaaagaatggctaattaagctccaaaactaaaagctctttctttattgctatttctttaagtcctaacaattggtcaggcacagggtcttagctgtgccattctagttaatggtcggttacaaatttccaccataaactcatcttccttctagcaacttaaatctcaggcactgggatgtaataaggagagaaagctcttaggcccagggcaatctctctctcaatcccaatctcccttccccccatccctatcccaccacagtaactgttagtaagagcttttggttgcatgcccagaaatctaactctggctaaattaatcaagaaacgaatatactggtttacccagctgaggtcatttacggaaagggaatgctaaggtttgaatgtgtctcctccaaaattcatgttgaaacttaatccttattgcagtggtattaagaggtggggccttttaggaagtgattcagtcaggagggcttggcccttaagcaatgaattcatgccttataaaggggtagagggaactaacttaggccctttcgcccttccaccttccacatatgaggatacagcattcatgccctccagaggacacaaggcaccaccttagaagtaaggaacagagccccttaccagacacaaaatgtgcctgtgccttgatcctggactcctcagcctccagaacggtgagaaataagtttctgtcctttataagttatctagtcttgggtattttgttacagcagcaaaaacagactaagacaggaagagaaaagaaccagagccccagggactagaaacaggactcactgcctcaaagtacatgtatactctctctctctctctctctcgctctctctctctctctctctctctctctgtctccatttctcttcactgtttgtctttgctcagccttattctccatctctctccatgtgggagggcaagtagaggctggcacctccagatatatatcctctctgttcaagaaccacaataagttaatccccagggaagattctgatgcctgtgccactccaaggtccaacactgctgggtggatagagcctgatgtttgaccagatatgtgccacttaccaaccatagcagacactggcaatggccacccatgtcccttggaccctccccatcccatacaagctgaaggcctccctctgcaagcacctgcaactccccacctgaaggccttttctcggcctcggcaagacaggccagaagttcaaggatgtcaaagtccctgagagaatcccttggtcaatgtcagatgagtgatgaaagataaatatctcagttttctcaacactcaggtgggacactttgaggtgtgttccatgccatcaaccaaagcccatcaaaaggaccaagccccggctgcccatagaagtaacttactcattaccttgctctattctggtttagatttccttgtctcattttgccctgtgatggttaattttatgtgtcaacctgactgggacgctgagtgcccagataattggtaaaacattattctgggtgttcccgtgaaggtgttttcagacgagattaacatttaaatcggtagacggaggaaagcaggttgcactccagatgtgcgtggtcctcatccaatcagttgaaggtctaaatagaacaaaaggccaacccttgcctgagtcagagagatctcctcctgcctgagggccttcaaactgaaacgtcaaaattttcctgcctttagactcaaactgaaacacggctctttctggatctcaagcctgctggttttcagactggaactacaccactgggtctcctgggtctccagcttactgactcattctgcagatcttaggacttgtcagcctccataattgcatacacacacacacatacacacacacacacacatatatataaaagtgcatatagatacatatatgtatgtgaatgtatgtatataaaagtgcatatagatacatatatgtatgtgtatatatatatacacacatacacacacatatatgtgtgtgtgtgtgtgtgtgtacatatacatgtgtgtatatatacacacacacacacacacacacacacatatatatatatatatatatggaccatagagaagtctctaagccaaagctggggacaggggaatcctgtgtctcctggggagaggtctgctttagtgtccctgccatgctcagtcattagccaggagcacctcatggaaggaagcttatggattccccatatgcttatatatgtgtgtgtgtgtgtgtgtgtgtatatgtatatgcatatgtgtgtgtgtatgtgtgtgtgctattctattggttctacttctctaaagaaccctgactaatacactcccattctcctactggtgcttcccagagtcaccctacaaataaaccattacatggaaatcctcatcacaggatctgcctctgggaaaacccagcctaagacatccatgactttcataggagaagaaagagctctagaattggcagccttactgaaccatgtggaagaggaaaggagagcacctaaacaaaagggtattaaccaattaaaataacctaaacccacacttgtccaaattgctgagcaagtgggatgggatgaaacaactttcaaccagtgtccaaatattgctgtgactcctagactggcttgacacaaaggcagtgtccaccagctctaaacatccatctcaactaagatttctccaggaaggctagaactgacaccctctgcttaggttctcagtgacttcacccagccagcaaaggagctcttaggaaggcagacaagccctgaagtctgtctgctcagactccagctacctgctctattcctgctttatcaacctctagcttagtcgctcaatctccagctttgctccttcccattagattctatggctgaacctgactgccatagtttgtttctcagatgaatttaaggcaagggttgcaaacttaaatgcacacatgggcagacaagtaacacaaatgagtgaagagtacagattagggcaactgggtctggtggagactgtggcaaactagagagcacacaacctatctaaggaggcagcgaggactcaattttgcaagatttgtggaatggactcccaatgttgccaaactgccactattttttaaagagaagcaggaaatccaggggtttttaaagatgtaaaatacacagtttgttgaatgctggcgactgatttttttttttttttttttgagacaagagtctcactctgttgcccaggctggagtgcagtggcatgatctcagctcactgcagcctcctcctcccacattcaagaaattctcctgcctcagcctcctaagtagctgggattacaggggtgcaccaccatacccagctaatttttgtatttttagtagagatgaggtttcccccttgttggccacgctggtctccagctcctaatctcaagtgatctgcctgccttggcctcccagaatgctggggttacaggtgtgagccacagcacccagccctgattttttttaatgtaaatactgtatgaacccagacaaatgttctgccaggccagtgctgcatggctcaccacgtggtggccctgagaatgggcctcatcgacctgcctctactgggagtgtaattaaccagggccccagctgctgcgctggggaatccatatgcttccttccatgaggtgctcctggctaatgactgagcatggcagggacactaaagcagacccctccccgggagacacaggattcccctgtccccggctttggcttagggacttccctatggtgttcgcaccctaacttttttctcctctctcttttactcagagtcagacttgcattactgtctcaggttctcccagctttatgtggcaccttctttgctttctctcaagggcatttcccttaataaaaatcacatatgtgtaatcctgtatgggagtttgtttctcagaactgggctgacacaccatcttgcaaactctgctttcggcattcagctcacacttacttacaccctccaaactccaactatttagggctaattccattccagctcccacccgttgaatcccttcccccctccccctgcttcctcctcccattctgctttcctggaaacagcatttccacttacttttgaacaatggtccttccttcactgttcattcatggagtttggatagcaccatcttctaaagctagggctgagcacatgatcaggactgactaatcaccctcttctacttccttagccacaataattcgttcagagatgggcacctgactcttacaatgcaatgagagtcagcttcttatgccagtgcttttggcaaaggtaagttcattttcccctgggattactaagctggtaggaggtaagtcagcagctgctgatggcataagaaaagggcctgataatgaagccaacatggatgaaaagagagctgagaagtagagatcagacagatttcaaagcatatcatttaagcatctggatccagccatacttgaagtccagtctatctgtgggctttgaagttgcatggaacaatagcaagatgtagctgagagagttttggctaatataccacctcacctctcattcagtttcatggaatataacagacattgccaactaaaatttacaaacagcattgatataaaagctccgccatttaaaaaaggaaactttctattctttcactgtgtggccttgggaaatttctaatccgttctgaacttcagcttttttccctctcaaatgtagcaaatacaacataacttgcttgccatggagggaaatcagatgcccttatctaggaaagtaaagatagaggtataaaacattgttatttcaaaaaaaaaaaaaaaaatccagcacataagtctaggagcattgaacaagggtcagattgcatggattcagattccagctccattactaactggctgtgtgaccttggacaactcaattgacctctctggccctcagtttccttatcagtaagacggaaactccaatcatatctattgcacgggatagttgtagaaattaatagatacataagtgcttagtgcaacatgtggcactcaaaatatgtgtggtatgattgttattgacacaatgtttgacccatgaatgattgtgatgccaaccccctcacagttggaaatccacctataacttttgactcccccaaaacgtagctactaatagcctattgttgaccagaagtcttaccaataacacaaacaatagacacatatgttgtattttagatgattatacactgtattcttacaataaaataagccagagaaaacaatatatgattaagaaaatcataaggaagagaaaatgtatttgttattcattaagtggaagtggatcatcataaacgtcttcatcctcattgtcttcacattgaggagactgaggaagaggaggaagaggaggaattggttttgccgtctcagaggtggcaaaaacagaaaaaaatccatgtataagtggacccatgtggttcaaatccatgttgttcaagggccaactgtatttatattacaataaatgctgttaatgttgtcactgttgacccttctattccattcccagcatcacttcctatgcccagtggaaaattccatcttaaaatcacccagcccaagccctcttcagtagactcagatagatggcttgtcaagggcatgacttaacttctccaaacacaaccagcccagtttcaactgccatttggggaactttcccaattaccacatttccgcacgtcaagtatgaattactttaattgccccagaagaacgcactgttgaaacatttgacttgcccagaactaattgtctgtcaaaaagatattttgcagccaagctgatctcttaattggacatctaatttaactgaaaacctttttccctgcttgttttatgctttcttctcctgtttttgccaaattctggatgctgggcactgctttcagaaataatttatcttgttattttctattataaaagtaatacatgttcattatagaaaaactgaaaaaaaaaattccacatgaagaaaaacagtggatcctagactcattgcccagaggaggactatgaacattccacatgaagaaaaacagtggctcctagactcattgcccagaggaagactatgaacattccaaatgaagaaaaacagtggctcctagactcattgcccagaggaagactatgaacattccaaatgaagaaaaacagtggctcctagactcattgcccagaggaagactattaacattccacatgaagaaaaacagtggctcctagactcattgcccagaggaggactatgaatattccacatgaagaaaaacagtggctcctagactcattgcccagaggaagactatgaacattccaaatgaagaaaaacagtggctcctagactcattgcccagaggaagactatgaacattccaaatgaagaaaaacagtggattctagactcattgcccagagaaagactatgaacattccaaatgaagaaaaacagtggatcctagactcactgcccagaggaggactatgaacattccaaatgaagaaaaacagtggatcctagactcattgcccagagaaagactatgaacattccaaatgaagaaaaacagtggatcctagactcactgcccagaggaggactatgaacatcttagcaagtctcccctcaggttgtcctagaatagatgtctctacgtagttaataaaaacatacattcaagttttgcagctttttgttccactttacattttaagttgaacgtttacacttcccattccaagatcttcagaaacatgtttagaaacagaagaatatcccaacaacagtctgtttaacctcttcccctaatgctgaactattgttgctttaagcatacattttctgtgtgtgtttcagatgtagtttccttaggaaagattctctatgctgtgcaacaattccccatgtgtctcttacatttctgcacatcttgtgtcagcatttgttctagaccgtctttataaggatgtttgtatagctaatagcattggaagatagggctaatatagtagaagacagatttatttgctgattaggattataataataatatctccggaccaggcgcagtggctcatgcctgtaatcccaccaatttgtgaggctgaggcaggcagatgacctgaggttgggagttcgagaccagcctggctaatatggtgaaacccccgtctctactacaaacacttaaaaaattagctgggtgtggtggtgggtgcctgtaatcccagctacttgggagacaggtgggagaattgcttgaacccaagaggcaggggttgcaatgagctaagatcataccactgcactccaacatgggtgtgacagagcaagactctacctcaaaaaaaacaaaaaacaaaaaaagaagaagaaaaagaaaaagaaaggattataatgacaatgtctccctccatccagggtaaaggttgaaaagaccaagattcctaaacttggggttcctcaggtgtgatgcaaatccactgcaggcacagattctacctggatccatccgtgtattactcatttctcacactgctaataaaaacatacccaaggctggatgtggtgtctcacacctgtaatcctaacaccttgggaggccgaggtgggcagattgcctgagctcaggagtttgagaccagcctgggcaacatggtgaaacctcatctctactaaaatacaaaaaattagccaggcattgtggtgcacacctataatcctagctactcaggaggctgaggtgggagaatcgcttgaacccgggaggtggaggttgcagtgagccaagaatgcgccactgcactccagcctgggcgacagagtgagattctgtctcaaaaaaagaaaaaaaaaaaggctaggcatggctgtaatctcagcactttgggatgctgaggtgggcagatcacctgaggtcaggagttcaagaccagcctgaccaacatggagaaatcccatctgtactaaatatacaaaattagctgggtgtggtggtacatgcctgtaatcccagctactcaggaggctgaggcaggacaattgcttgaacttgggaggcagaggttggggtgagctgagatcctgccattgcactccagcctgggcgacaagagtgaaactctgtctcaaaaaaaacaaaaaaacaaacaaacaaaaaacataccctagactgagtaatttataaaggaaagagatttaattgactcagggaggcctcgggaaacttacaatcatggcagaagggaaagcaaacatgtccttcttcacatggcggcagaaaggggaagaatgagcaaaagaagaaaaagccccgtataaaaccatcagattttgtgagaactcattcactatcataagaacagcatgaagataactgcccccatgattaaattacctcccactgggtcccttccatgacacatggggattgtgggaactacaattcaagatgagatttgggtggggacacagccaaaccatgtcaacctgtgtcacccttgagggacttgggggtcaaagggaactggtgcagacatgaagctcaagcttcctgttgtgccatgaaaaataaagtcctttatctctcaatccagagtctcatgtcttctgcccacatccataaaactcgctagcctccatgtaggataatatcttagaccagcacagttcttgacactctagaagtgaatttgttggatcaaaaagcatgaacaattgctaaaactcttaatatgtcttgtcaattagctctccaaacaaatatgagtcattgcctgaaatctcttttgtcctcaggaagggatagagctgcttgactcagatctctcaggtggccttagactgtaatgtcttcctttcgtgcagagctcttaccatcctaagccactacacctacctaatattctataaaaagctttttctccctacccagtgtctccaatgagctgactttcttttctggattactcttttatgtaataaaaagtagacatgagggtcaaacagaaagggaaaaaggggaatttgtttaatttctaccaagtgccaggcatagtacaaagaacatttagataaggcagaaggcattaattatttttatctacccagaacccactgccccacctaagcaccccagcccctgacctggccacgtgggtggctatgtgacctgagctgaaccaatcagagtccttccctgggatttttttcacatcataaccacatgagaaggtctcccattatgaaacagagaagcttgttggcagccatggttctagccaaggatggaaaaaacaaccaaaaaaagaaaagaaacaaaaaaaacccaccatggtaaaaaaatacatatataaaaataaaaaagatatgaaagacagacagacatggggaatggtctctttccagttgcccctgccactcaactgctctcctaccttcctggatttggttatgagagtcaataaattatccccttttattgcctaaatgacttccatatgagtttctgctccttgcaaccaacataatcttgacaattaatagtagctagcattttgtgagtgtttactgtgccatgcccattaatacacctaatcctctctacaattggacaggtaaggtgcttttagtaacctccaatgtacaaaaaggaaaacaagttgggtgaagtgaaatgacttgctcacagtcgctgggctaacaagggggcagagtcaaagtttaaagccagagcccatactcttccctattgtataacacagacatgctgtctctgttcccagtgctggggaatgcagagaactggggactgaaggaagagcaggcgttcaggtaagcattaatcaggggaccttccacaagggaaaagggagtactggcccagttgaagtccagccagcactcagcatggtcaaggatggggtggtgctctctccagccattcaaggtgctgagaaaagaacagaactttcatctgaggaatacaagccttttaaattattaggcccagagaggcaatagaacgagatagcaatcatgtcctacataccccctttgagctcggtattcatttcttaaaactgcttgccattgccacaagtagctataaattaatctaataatgccccactggatgctataacccacacctcatagcttaacaatgtatagccaatcactcgtcaatgttatttctgaaaaccagtgagaattcctggcaaccaactgtgtaccagcccactccatgtcccccttttttgcctttataaatccacttgtaactgctgctaattggagtgtatattcagggaaacttgaatctatgctccctggctacagtcctcaagcttggcccaaacagagtctttacttatattaattttgcctcagcttcttccttttaggttgacagtgctacaggctgaattatgtccccctaaaattcaaatttgaataaatgttcaaatatgaatttgaggccaggcacagtggctcatgcctgtaatcccagtactctgggaggccgaggtgggcagatcatcttaggtcagcagtttgagaccagcctggccaacatggcgaaaccccatctctactaaaaatacaaaaattagccaggtgtggtgacgcatgcctatcatcccagctacttgggaggccaggataggagaatcacttgaacctgggaggtggaagtggcagtgagccaagatcgcaccactgcactccagcctaggcgacagaacgagactgtctctctctctctctctctctctctctctctctctctctatatatatatatatatatatatatatatatgaatttgaagcccttcaaccatatggatcatatcttgaagccctaaccccctagcacctcagactgtcactgtatttggagataggggcttgaaataggtgattaagtttaaacctatttagctcatttagggtgagctctaatccaaccagactcatgttgttataggaagaggagattaggacacacagagagacaccagggatggacaggcacagaggaaagaccatctgaggacacaccagaatcgaccatctgcaagccaagaggaggtctttggaggaaccaaccctgctgacaccctgatctcagacttccagcctccagaattgtgagaaaattaatctctgtcatttaagccacccagtctgtagtactttgttatggcagctccagcaaactatatctacaggaatccatcaccacttatgacaggctctgccacatagtaggtgtgtgtgcacacaccacacacaaacatgtttagaatatgaaatccgtgaaccctactcccacactgataacagttcaggaacagttgattttccctcagggaatctggtttgttttcctagtttccatcccatcaagaccccttcccacctgctgggaaatacttgcctgaacccctcgttcctttcacaacacacacctgatggtaggaagaagcttccaactctgatattgacagggtgcttgtaacctagcaccctttctcctaccttgttatggaaaaataaatcctttatcctatttcaactacagtcttggcaaaggaaaaaacaaaacaaaaaaggaaaccagcctagaaatggaaaccaaagatcatgaacagtgctatgctgagttacagctaagggttggcctttctggagctggctgccttcagatggcagggctctgagtgtgtgtgtgtgtgtgtgtgtgtgtgtgtgtgccagaagcacaagatgacacaccctgtggtggggtcaggcaagctgattgtgggaaaggtgggaacagaatattttacaacaatgttggaaaaatgggtttacattctctgagaggaagatacccaaagcttcaagctcacctcaagggaaaattgagctaggtttccatgctctccacttggatctcacgcacatgaacacacatacaaccttctcctcaatattcacaagaggcctctgttgtctgcttctccagagagcggaggtgaatttacctgaagctaatgaggcttgggcttcagggtcttttccttgtacctgtctctttaaatgctggacttggggaaggctttaggtgagaagggaaagctgggtttcaataatgaagcacctctatgttcacatttctgattaattgcctacacagatcccagaagaatggaatggaaatagctaaaggctccagaattttctctttttatttttttgagacaacatctcactctgttacccccaggctggaggctggagtgtggtggcaagatcatcgctcactgcagcctctaactccctggctcaagcgatcctcccacctcggcctcctgagtagctgggactacaggcacacaccaccacacctggctaattttttgaattttttttttttgtagagatgggggtcttgccatgttgcttaggctggtcttgaactcctgggctcaagaaatcctcctaccttggcgtctcaaaaagctgggattacaggcatgagctaccatgtccaggcagctacaggaatattatacttaatttctcattccaaaataacattctcttttgtgcctaattttaaattcataattttgtattctttttcttaaacagagatccccatattataaaagcttcagtccccacaaaaactggatctggttctgccaaaatgatatatcctttatgatatttatagagacgttctgattatttctgaacatctcagactttctggaaccaagacaggttcgattatgaacatctgttgtctaattttaaagaccaagggggaagccgggtccttatgagggccataaaggctccaagctagatggatattgggggagtgggttagcagagatgtcctaaaacaatgaattacactaatgggaagaacaaaaggtaagtctaatcacagatgtcttggttttcaagctagtcagacttcagataactgtcaaatcttcagccataaatcgaaagtggaggagaattaaagatccatccttgtttgcttacagaatttacttaatttagccactctatccttaattgatagcaacaggttttttcaaaatagtcaaagtaatctatgctttgctacataatagcaaaagtaatagccaacattcatcaacacctactatgttatacccttgacagggtttcctattttagtagtcaaagcaatttcatggagtagcaattacagttgtaatttcactagtgagaatgcagagtgaggctcagagaggttaaggaacttacccaaggtcacacagctagtgagtggagagttggaatttcatctctctgattttaaagtctgggccctttcctctactgtctctctctgaactcaatgacacatcctaagtaagtaagggcttctacacaggatgtgttagactatgctgcagtaacaaacaacccctggatctcaggaacttaaaacaaaatttcaggctgggtgtggtgtctcacacctgtaatcccagcacattgggaggccaaggccagtggatcacttgaggtcaggagttcgacaccagcctggtcaacatggagaaaccccatctctactaaaaatacaaaaattagccaagcatggtggtgggtacctgtaatcccagctacttgggaggctgaggcatgagaatcacttgaacctgggaggcagaggttgcagtgagccgagatcacaccattgcactccagcctgggcgacagagcgagactctgtctcaaaaaaaaaaaaaaaaaaaaattctagaaataactccaaccttattttcttgaacacgactcatcctgaccctccagcactccattgatctgggctaaatatatggaatcctgcagatgaagacaccagcacccaaagctaatgggacacagaaaacagaggccactcaaataaatgtcagcactcctagttactgaatactctgtgtctggcaagtttcatcattagtcagttattcattcactcaatcaacaactacttactgagttaatatggcagcatggttatgagcacagactctggagcaagaggtcctaggttcaaatcccagttaccctgcttatcagctaaatgacttctcagtgccttggtttctccatccagaaaaatggggattataattaataattgcctacctcattgggttaagtggataaactaagaacagtggcatgcccatatgacatgctctataatttttattatcactgtgtgccaggcattattctatatgatggaggatgcagctatgaatagggcagacaaggtgcctgtctttacagagcttctattctagtgaaggagagaggctttattagcgagtaatccttgatcgagccatacctgaagctaatgccacatccttcaaccttccaatttccccaggcattaagttcttttttcttttctgcctaggctagcttgcactgagtttctctcccttgtgaaccaaagtgtcctgaccagtacagaggtctaaagcctaagctctttccagtctgccccttgcccctttccagctgaagccctattcatttgcacccaacatcatcattgcgtccagtgcctcaccacttggtgagacccttgaatattcaaaccagcgtgtaagcagagagttaggaactataaacagtaaattataacaagcatgaaatggaagcctgctgctgatcattcgcaagagagcaatcaaatctgtcttggtgcctacatgttttatggaaaacatgtctatgttttaaaagtgtttttgaaataaaaaataatttactaactaaattagatttccacatgttttatctagttaacccatcccttatcataagaaacgtaacttctttttttttttttttttttgcgatggagtctcactctatcacccaggctggagtacagtggtgtgatcccggctcactgcaacctctgcctcctgaattcaagtgatgctcctgcctcagcctctcaagtagctgtgattacaggtgtgcgtcaccatgcccagctaatttttataattgtagtagagatggggtttcaccatgttgaccaggctggtcttgaactcctgacctcaagtgatcctcctgccctggcctcccaatcatggtgggattataggcttgagcccctgtgcctggcctagaaagctaacttcttaattgcaagctactttcatcaatataatgcatttgtctcactccttaaaggactcctgtcacagtggattggcaaagaacaggtcagacacaagaggcagtggagtattagtaaaatacacgtggatttggagtcagaccttcctaggtttaaatgctggttttatcgcatactagttgtatgccttcattggggtttcccaagaatcagaccctgagacaagactccaagagtaagtcatctatgtgggaggtaaatgaaacatgacacaggaaatgaaataggtcagggaggcagccagtaaagggcatattataaaacaagttactacttgggacaataactggaaaacttgctggaaaacttgctggaaaactctaggatacagtgtagaacatctctagcaatgtgctggtagatgtttaacaaccaacactgcagaaaaatattaaaagcccagatttgtagtgtctgcccatatccatggtgtaaatcctcccaccatggctgatttcacactaccttgtccctgaacaaggacttggggaaagatgcacataccagctcttgcttcatagttatctgacctaaggggtgagggagatggggtacttatccacatacaccaactctcatcagttcctggtggagggatgctcccagggcaggtgttgattcctccaagacttccaagccatcatacgggtgggcaaagacagtacaaccagaaaaagacctcagaaagagggccaggcatggtggctcacgcctgtaatcccagcactttgggaggccgaggtgggcggatcaggaggtcaggagatcgagaccatcctggctaacacggtgaaaccccgtctctactaaaaatacaaaaaattagccgggcgtagtggcgggcgcctgtagtcccagctactcgggaggctgaggcaggagaatggcgtgaacccgggaggcggagcttgcagtgagccgagatcgcgccactgcactccagcctgggcgacagagcgagactccgtctcaaaaaaaaaaaaaaaaaaaatagctgggcatggtggtgcatgcctgtaattccagctactcaggaggctgaggcaggagaattgcttgaacctgggaggtgggagctgagatcaagccactgcacttcagcctgggcgacagagtgagactccatctcaaaaaaaaaaaagaaaagaaaaagaaaaagtcctcagaaagagaatgcaactacatttggatgggtcagtggatgcttaagaggtaaagggttagaagatacaagggaagcactgaaagcatctgttactctgtgcaattgtgaaaacgttatttcatttctctaggcttccaatattgcattggtaagatatgattcattgaatcttccaacaaatattcatggagcacttagtatatacccagcaatcttcaggccataggaaacagaatgttgagttaccatgacaaagtcactgtcacagagccagtggggaaagcagcctctaaacatgccacccagtaagtaacaaagatcatttcgggaatggtgaggactatgatgttagagagggtgatgggagggagaataatgtagcggagaggacatgaacgggaaaatctttctgaaagggtaacgtgtaaggtgaggctcaacagatgagaggaaatgtgttgtaaaaagatctgggagcagcattccaggtggaggaaactgcatgtgcaaaggcccagaggtgggaaggagcttggcttgttcatggaaaagaatggaagccagtgtgtctagatcaaaatgaatcaggcagaaggtaagcaggtaaccaggaaacagagtggaggggcaggcaggaatcagtgtctgcagtgcgtgctcagcatcataaagggtttgggtagtaacacaaccctgaagagttgttaaatgagctcccatgcatgtaactggcattactcatgttattaacctgggaaactgtcacgtctcttacttttccatttaatctcatgcccatcctctttgctcacaggagccaagaagtccagtatctcactccacatctgccttctcgtggtccaacactctgccgactcagttaatccaaagatcacttccaaacttcaggctgatggaaacctgaggagtcggatccattcataggcagccccattttcaccttcccttgtccccgaggctgccattaggttgaaaaccagtctggtactgtcagcgtgtctttgtctacagctatgaaaaagtccacatagtccagtctctacatagggcacaatgattctcctctacatctcagctaccaggtaccagcttgtcgaacacacatgcaaacattcaaacccttctcaggttcccctctagggccttcagggacttatccggcatacctgaggttggggccattgcaatctattcttagtctagtgttaagccgggtcaacagcggagatgctccttctccttgaactaattttatttccagagtttcattttccttccctgcaacattaggcatcatttggggatatttttatccatccatatggatttcaaaatctcataaagaaggagctgggagaagaatgaggaatcactgattttaatgactgtatttgttgatctcttactccattcctggacccatgttgaataacataaatatatatgcatgtacacatgctatacatggtatctggatgctatatgtgttatatataacatacatgttataatatatgttagatatgtatgtcatacatatcataatatataattatacattgtatattatatattatactattacatataatatataattatacattgtataattatactattacatagtataatatatacttatgtttatataataaaatataatgtatatgaaatatacataatacatatatgatatattatataattatatcatataatatataattatgtatatttcatataccatatattttatcatacataaatatataagttatatataatatataatgtcatatattatataaattataattattatatattatataaaacatatattatatataatacatggtttatatgttatataacatatataacaaattatatattatataacgtgttatataatataacatattatatattatataacgtgttatataacaagttatgtaatatacaatatgttattaaaaagatattacagaatatattaaataatgtatgttttatatattatattatatatgttttttatatattatataatatatatgttttatatatattatttttgttttttttgttttttgggggttttcttgagacagagtcttgctctattgtccaggctgcagtgcagtggtatgatcttggctcacagcaacctccgtctcccgggttcaagcaattctcctgtctcagcctcccaagtagctgggactacaggtgcccacaaccaggcctggctcatttttgtattttctttagaggcaaggtttcaccatgttggccggactggttctcaactcctgaccccaagtgccccgcccaccccatcctcctaaaatgccggaattacaggcatgagccactgcatccagcctatatatgttctttcatcatcaccacatcatctaattttacagatgagaacactgaggcttggggagatattaaatgtcttatccagattgcatgcatgtaagtgacataagcacgatttgaaactaagcaatccaacacgagagtcctaggtctagagcctctctgacctgctttctacctagaaattatctgagttctttatgcaaattgatgcactttttcatccctttggtctcttgaagtggcagcttttgctgcacccagttctcacaacaacttgcaaagaggatcaacacacacgactgatcacgagataaaggaagtctgaagcagtccccaccaaacatgcaaattcaatgaatgaagatccatttcttgcagctttctgctttgtataataacatttggctgtgatgatctattatgacactaatccttgcacagcccagagaagatgggcaatagttttctggatgtcagtgggactctggcacaagggccagccaattttggtgagcgcaacaggaaattctttgcaatgtccttgtgaatctgaggttacaaagactggctcaatctgtcacaggaagcatgctggaatgcctttgtccttctttctagtttttctttctttctttctaataattctcagtgtgggagaatattattctttctaataattctcggtgtgggcttacatcctttgctttgggaaaggtttctatcattagacctctcttttcccccaaccagccagctgtgaagcggttcactgcggacccaacctctggcatgactgtggatcagcagcaccaatgccatgaagactgcagacacactggagaaccaaggctaattcccttagccattgagcctccgctttccatccatgaaatgactctcaaaatgccagcttgggctattgcttgcttcagagcacctaagagcatctgaacaaaaggaatatctttttcacagatgtaaatgaggaaagcgaggattatacagtagaagaagtgctctataaggctgctgaagatcacaattttttttttttttgagacagtcttgctctgtgtcccaggctggagtgcagtggcgcgatctcggcttactgcaacctccgcctcccaggttcaaacgattctcctacctcagcctcccaagaagctgggataacaggtgtgtgccaccacacctggctaatttttgtattttttagtagaaacagaatttcatcatgttggccagacttgaggtcaggtcttgaactcctgacatcaagtgatccacccgccttggcctcccaaagtgctgggattataggtgtgagccaccgtgcccggcccgaagatcacaattcttatctaactctgctattcattggctgggccaccttgggcatgtccattagctttctggttcttaggaccctcatgtctaataacaaggtctttcctacctgccccacagggctgttgtgaggaccaaatgagatcaagaatgcaaaagctctctgtcaactgtgaaacactaccaggagtaaagattcacaaggcatgagttgccacaaggcagtatagcatggtggttaggaggttaagctcttaaaccagattacttggattccagtataaccccaggatacttaactttgttttgtggtgttgttgttttgttggtgttgttgcttggtattttgtctaattttcagaaacagggtcttgctctgttgcccaggctggagtgcagtgggcatgatcatagttcactgcagccttgaactcctgggcttaagctatcctcctgcctcagcctgtggagtagctgggactacaggtgtgcaccaccgcacctggctaatttatttaatttttgtggagacagggtcttgctttcttgcctcagcttgtctcgaactcctgacctcaagcaatcctcccatcttggcctccaaaagagctgggattataggtgtgagtcactgcgcccagccaatttaaattctttaagtctcagtttttccatttgtaaaatgggcatagtaatagtacatttgtcacagagttggtttgtgataggataaggtgatgcatgttcactagaaatgaagagagaagggttatgattcattgaaaagaaagaaaaacctaggctgggtgtagtggctcacacctgtaatcccagcactttgggaggctgaggcaggaggatgaattgaggacagaagttctagaccagactaggcaacatagtgagaccctgtttctactaaataaataaataaataagccaggcatggtggcatgaaccctgcagtccaagctactcagaaggctaaggcaggaggatcacctgagctcaggaacttgaggctgcagtgagttataattgtgccactacactccagtatgggtgacagactgagatcttgtctctataaagaaaaaaagaagaagaggaggtagaagaagaaagtctgaactactccctgcaggaagagtagacaaggtaaagagccctagaaaagattcgtccccgtgctttcctctagaatgaggactccagtaatttataccagtgctggagcacaggcttgacaatggctggagctcagcctccacagtatctgctgtgattagtgctcaaaagcataaagcataactggaactaagaagaaacaagatgctcaaggtctccccttcagccttccttccaagtaacagaatcatgatttgatgatttgaccccttcttctaccacctcaatattgaaatctgtttccaattcccattaccttagagaacaccatcagatgtccattgtatatctcagattcatttctgtccaaaaacgaatttaacttgccttccaaataattttactcctaatttttagctcactttctccatgaatatcatcgccattcacccagttacccaaaccaagagcccgaacaacatctttgagtccttctccatcacaccctacattcaaccaattgccaccttctcttttatatacctccttaagtcacggccttaatttgggaatgatcgtttctcatttggacttgacttcatggtcaaatatggcatccagagatctagccattgcatcctaattcaagaccaacaacaggaaaaatgggcaaagaaatatatggtcctcattctgagaaaatgtccatattactcttctctttgcattccttggccaaagctaattcacatggcttgggtagcttcatgagagactgggaaattagagggttttggttttgttgttgttgtttaaagcagagtctatgtcaccctaattaaaatcagtgtttcatcttttattcttcctcaaatattctgtgttaaagtcactaaagggcaccaaccaaagtaagcatcaatgagaggggataggacagagatctggcatggggtgttgaagcctagaattggtgcacgacctagttctagtcacgaaaaagcatcagacaatccccaattgagagctcttatacaacataaatggcctgtatcttcaaaagtatcaaggtcgagaaagtaacaaagagactgatgaatctgccggaataagacgtgacaattaaatgctatgataatcttgccctgcaagattataaaggacattattgggatggtcagtgaaacctgaatggggcctttggattagatggtggtaatgtatcaatgttataataatttcctgactttaatggtcgtattatgggcatataggagaaggtccttattgcaagaaacacacagtaaagtattgggaaatgattcgaggagagggaaaacttaattgtactgttcttccaactattgtctcagtttgaaatttttcccccgaaaataaggtgttatttcagagaagaaaagggaatgtagatgtttcaatatgtaaatagtagactccaccacagatggtatttaaataatgtatcagaagaggtcatcccaagggagtaatatttaaatccagagccaaagagagaaagccatccacgtgaagagcaaggagacaaagttttcaggcagaaggaacatgtgagaagtagctgaacttgttttcagagttataaccctagcaatatggtggaaaataacaaataactagcaatgtggttgaaataaacaaactgctattccttcagaaacatgagtaagcaccactgtgtgcaggaacttgcagcagtcagctagatgctgtaagacaaacaaccccaaatcccagaaagagcttatttctctgccatgcccatatagcttggctggagcagctctgctggaggttgcaggtctgaagacatgctggggcggctctgctctagatgcatctcatttttctaggaccagtgaccaactaagtcatgtttttctcatagagaaggcaaaagcacaagaaggcaaactcatcacacgagagcatttcaagcctttcataagggttatgtcctctcacatcccattagccaaagaaagttaagctcaactcaacagttgaagggtagggaagtacactatgccatctctcagggaaaaggaagtcacatagcctagctgaacatcaatgatgtaataggagagggaacaaatatttactaaacaatagtctcatctaccgtaaagctcaaatacttcacaaaagagccacccttagaaatagcttttatctcatctattttatgggtgagtggggaagaaggatgacaaagcccctttaagaattttatataccctagacacattcacttttggaggtctcaccagaaagcatttgaaacatgctacaaatttgcctgtatcctacattaaatggatttttggctctaaacattttttgagaaaattttaaaattctgctcctgaaattatctggcaataggtgatttatttaaatttagattggatgtgatttcttggtaattgtgcatattcaggaggtctagaaagtgggaaattctaactatccacatttttcagatgtaatgaaatccctaggaatgttaaatttaacaattagtgatattgacaaagcagcacaatttgtaggtaatttttttttttttttttttagaaggagtttcactcttgttgcccaggctggagtgcaatggcatgatctcggctcactgccacctccacctcccaggttcaagcaattctcctgtctcagcctcctgagtagctgggattacaggtttacaggcatgcaccaccataccaagctcattttcatatttttagtagagacagggtttcaccatgttggtcagcctggtctcgaactcctgacctcaggtgatctgcctgcctcagcctcccaaagtgctgggattacagtcgtgagccaccatgcccagcgtaggtaatttttaagatattcattaatttcaattttgtcattttctcttttgcatttttaagccaatgtgtgtgtgtgtatgtgtgtttgtgtggtgtgtttgtttgtttgtttgtttgtttgtttttggtctcaaacatttctgtagatcttgaaaaacgtataggtcccgggaagaccctatgcctaacggattaaaaatgcacatgttgcctggaatcaaagctaattattattggttgggaaatggataccctcccactccagactcctcagcacaggaaaataagagcagctaactccaacagaacccaattcatttaggaggctctctgcctctgcataagggtgaatggtttgggattgctgctcagcagagcccttcatctcattcacgaagccattcacactgtatccagtccatttgtaaggcaaataaaaatgtcgtcttccaatcttggctcatttcatcttataagaaaagtctcccgtccgatgcctagccaacatttccctgttgtgattaaagaaacagcaggtaataaaagctggactagcggttggtcctctaaggaccaaaatatggttgaagaagcaataacttaccccagtgcccccaaggcaagttgtctcaataatgtaacaaagctatacttaatggcaacagagcacgtttcactgatactacaccgtaaactgcccgctttcaattagttgcatatgtattaaagggagtcaacacatatttacagcaatcatttctatgtatacaagatgccacaaaaatgtagctttctgctccttctggtcatctggccacataggaataatcaccaaccatagatgcaattctggaaaagtcattaatgctcatctctatggttgcaagagattattgggcttctatttcatgccaaggcactttacatatgtaaataatggtgcatgctttgaatgaagtcatgtttttgtgacctacaatccccactggctgctgcagcacctggcacatattagccactcaagaaattctcgttgagtgaataaatgaaacattcaatggctctgagagcctacctttcagattatcagcaccatgaccctgcttttgagacccctactctctctcccttccctattatctcttggtgaatattggggaatggctcacctgaactgccccacgatttcatgcctctgttttcgccattacctgtcaccttacctggccacagtcattccttccaaagccactattcacatctctatcagatgctctgcagttctggggctcctgcctcttgggacaaggctagtactgtcataccaggtgtgatggttaatattgagtgtcaacttgattggatcgaagggggcaaagtattgatcctgggtgcgtctgtgaggatgttgctaaaggagatttacacttgagtcagtggactgggagaggcagacccaccctcaatctgggtgggtaccatctaatcagctgccagcatggctagaataaagcaggcagaagttggaaagaacagacttactgagtcttctggccttcatctttctcctgtgctgtatgcttcctgccctggaatattggactccaagttcttcagcttttggactcttggacttacaccagtggtttgccaggggctctcaagcctttggccacagaatgaacgctgcactgctggcttccctacttttgaggttttgggactcagactggtttccttgctcctcagcttgcagatggcctattgtgggacttcaccttgtgaccgtgtgagtcagtacccctgaataaactcccctttgtatatacatctatcctattagttctgtccctccacagaaccctgtgtaatacaccaggccagcagaagggagacatttgctttcctggacattttctgttcattttacatttgctcaatgaaaaaaatcaggttgcaatacatatataaatagaaaacacagaaagacataaatattttttaaaaagaatcagaaacatatgccccaaaatgctaatatgattacatccgggtggttaatatttattttctgtttctattctctttttgtttccccaaatttgcttgttgacagaacatgtgcattgcttttggccaataaatgtttggcttatttaaagagttatcttgatgatagccaggtgtggtggctcacacttgtaatcccagaactttgggatgccaaggtgagcagatcacctgaggtcaggagttcgagaccagcctggccaacatggtgaaaccccatctctattaaaaatacaaaaatcagtctatcttaaaaaaaaaattagctaggtgtggtggcacgtgcctgtaatcccagctactcaggaggctgagagatgagaattgcttgaacctgagtggcggaggttgcagtgagccaagatcatgccactgcactccagcctgagcaacagagcgagactctgtctcgattaaacacacaaacacacacacacacacacagttatcttgatggcagttcaggaacttgggagatgagggctgttctcctaaaaccctataagaaccctcaggtgggttatgccacccattcactaatatcccatttacgggtgaagggaaaggtggaggagaccaaccaacccaccagcagtggcctcagtctcaaataaaacttagtccctgagttagaagccaacttaaccatggagaggaaagagttcatcagatgggactaaacctgctcacttccttccaagaaccaccccaagggttcatttcccaggcaccaggagccacccagctccaacatgctgttttctgtcttctggtgacttatcacttgttgtttcttcaagaataagccttcgttgttccaagtaaacatctcaaatgcacacattcttaaagtagtaagtcatgtatccacctgtgcatccaacaaattattatgtagtgaacacccatgagggacgtgctgctgtgttcaatgctggggacaccacagggggccacccacggacttggttcctgccatcatggagctctcggtccagtggaggaattagacatgaaccaaataaaacacagtcatgaatgtaaaaccagaaactagagtaagtgctcttgaaactgccttagcaaaattatgactgagacagtgaaagagatttaacttgatcaattccatcttgcttctaacctccaagctgtccttattcattcttgggtgtaggctgacctaactttgggagaaactgagttcatggttcatagtttgtagtttaaagcaaagatgataacagccctttcccaaagcagacctccttcttgcctggggactagattgcctttgttaggactaaaatgagccacaagattagaaactatggtttaggagtcaggcggctggaggttacaagattctgaccctccctaaactgttcctaagatcagtgcttgagataatttgcagaccctgcacgtgacgggtcaggtggcaccacccagatcgatcaactggctcatctgatcttgtggccccaacccaggaactgactcagcgcaagaggacagcttcgactccctatgatttcttccctgaccaatctgcactcctggctcactggcttcaactaaccacccctaccaagctgttcttaaaaactctgctccccaaatgcttgtggagactgatttgagtgataatcaaactccagtctcccacaatgcccctctgcatgaattactctctctgtattccaatccccctgtcttgataaatcagctctgtctaggcagcgggcaaggtggacccaatgggcggtcacactctgtcgagaaggaacacagggagttgcggaaggcttccagaggaagtgcctgggctttgaagaatgagcaggcattaagtgggcaaaagagcatgtgcaagggtactgtgcaatgtgtcaccacccagggagagaggagaagtggactatgaggctggggacataaacacggtcctggccatggagggccttgtaaaccccatgaaggatgtttgctctttatcctaatatcaacatgaagtgattagaaggtagcaagcccttgattaaccaacaattctagatccttctccaaacttctcttttagggaaaggaaacctagaagtcaaaacataaggtggtgggatttcagttgaaaaggtgtccagggtcggcctcgggtcagtctatctttgggtctatcacaaacactatattaattgcccctattaatctttcattatgtgccaggcattgtgatgatgtatactttatatccattggcacatgtaagcctcaccacaagatttagggcctatcattatgcccatttcacagatgaggaaactgaggttcaggggggcttgtaacatgtcccaaatggtgtagctagtaagtggcaatgccgaggctcaaatccctccaaagattctctctccaaaggtcattttcctttccctaagccatgctggtgcatctggggtcctggaaactaggagatgattttcagaattataagacttaggtcgtgcaagcttcttaatcatcaaagaaagtctggaaagagaagaagatgtttgcaggaagctgccacagaagagaacattttagacagaggaacagcatgaagaaccgaacacacgtggcatcccctaggggccatgaatatagcagggaggcaaccacagagttgggaagatccagagagaggcgggacagatacagtgggtcctgaaagtatgttaaataaagtcacagtgacacggcaatcaggagtggcaagggagccacagacacacatgattagacacaaaaatcatgttttcaaggcacagcccacttagagatcacagcaagatgctttatccaacctccgccggcaatcagagcttgaaaaaggagcattgtcgtcaatcaacttccctttgggcaaaagacacaggcaaaggagaagatacttcacccaccttttaataaatgtgtcttgaggagagagttggcccacatagtacagtctccaagatctaagactccacatgggtagtggcaggggagacaatgggaaccaacaggacattggctggaatcacaagtcacaccttcagtaaaccagaggagtcatttctctctcccttattgactctgggccctggagaaatgccacagaaattcatgagaagaggagttgaaggtagacggcacctggacattatttctgccagcccatttgagttcatctggtaaacattttgcatttggaagttgacatcgtttaataataactgtcaatgtcaatgatcaatgccatcataatggcacaaatacccttgtgggcttggggttgggaggggtacggtggggactgacttctttgtctcctgtcctttcaatggttataaataatgatgataataatttctatttgtgtagctttgtgattgcagagagctttaggcttcctgagagctttcacctatattacctcagctgatccctctacaatgtgcagtatctattttggtcccctctgggaacctgaggcttgacaaggtcaggaaaggccacaccatggcctgttcctgaaacaggaaccacaaatgaaaatccttgcagagagtccaggcagataacataagtgaagaaagggaggaatgagaagcagtagggaatggtggggtctgtggtgaattggagtgcatgcctcattgaaagacgggggtagctgcctatcttgtatccaccaactgtctccacgtgggaacatgggcccaatgctgtcagagcttctaataaattaagaggagctaaaagccagatgctatgtcagtctcccagtttttaaatgatcgcaactgggagtcttgcaactctgtctcccaggctgtaaggcagtggcacaatcctagctcactgcagcctcgaaaccctaggctccaaagatcctcctgcctcagactaccgattagctcgaactacaggcatgtgtcaccatgcgtggctagttttcacaatgtttgtagaaatggggccatctcactatgttgcccaggctggtctcaaactcctgggctcaagcaatcctccctgctcagcttcccaattagctagaactacaggtgtgcaccaccacacctggctacaaactctccttgtcaccccctgttgataggtctctttccttcacaggctgagacaactccaattcaactctgaatccccaatacaggacctgcccagggaacagggctcagacatttatgctgggaaatactcagcttttggggctcagcgtccttttctgcaaaaagagttcccctcccaagaggaaatcccctaagcctaaggacaggaggtgatggaaagatggatggatgggcagatagatggatggaaaaaaaatggacagttggaaacagacaaacttggtggatgagcagaaataagcctcattctcgcctaacaacgggacagcctgggggaggggtgggacacaccaaggctcccagttgacccccagcaattggacaagagagtttataaaccagcattggggttttaggagcattgtaagctgcagagtgcatggggtcttcagtgggaagcatctccttccccatccctgttctctgtcctggggttgcccatcaagctaatcacatgtccacccctggggtccctctggcctctgccactcttcaccaaagtacagttaaactccaggggcaaatgatgtgttgggggtgtggcagacagggattgtgtctcagcagagagggcacagcactcacaaaatagcttcaatagttccagggtcagtagatgtgcccgaagaggaaccccacatcgcaagtggcctaagcctggggtagggtgagcactgctcactcctgcccagaggagtagctgaggggcctaagctctagctctgagcccaccagccattccatccaccacccacctgaaactgttctgttgacccacagcaattggtcctggtgccaggcacagaacagatgctcaaaagatatggttgattctgtctgggtgcagtggctcacgcctgtaaacccagcactttgcgaggctgggatgggaggattgctggaggccaggagttcaagaccagcctgggcaacatagtgagatccctatctctataaaaataaaaattagctgagcatgatggtgtgcgcctgtagttccagctactcgggagactgaggtggaaggatagtctgagccaggagttcgaggctgcagtgagctacgatcatgacactacactccagcctgggagacacagcaagaccctatttaaaaaaaaaaatggtatggttaatctgcctttactgattacaaatcaataaatttgtattatcgtaataaatctgtctttattgattacaaggcactttctcatcccccatcacctaagacaactgcataaagaccgcatgagctataaagaccatttccttgccccaggtcacacggaggaaaagagacagagccaggatttaaacccctgcccctggctttcattcctttgctgtgtccctgcagacccgaggcccacctgggtgaagaacaggtgggtggacattggcagtgttcaccaggggaagcatgccaggtgcaaggaaacatgtgagcacctgtccgtgcccaatgggtctctgtttgtctccctgcatcttcacccaaaccagcttctcacacccccacggccaccaccaccactccaggcctctacctgggccctttaatgccccttccccattcctcaagagcccactggggtcccttccctgatggcctgctggcctcctgcctccctccctgacctcagcctcctcggattttcaacagcctggggttgcaggctgagctcagcatctggcaggggcctggaagaaatgacctctagagggcccacactctctgggtgtcatattttggggctattatcacaaaataccttagactgggtaatttataaatgacagaagtgtgttgctcacagttctggaggctgggatgtcccagatcaaggcacctgcagattcagtgcctggtgaggagggctcactctgcatcataggtggtaccttgttgccgtgtccttatatggcaaaagaggcaaaggcgcttgctcaagccccttttataaaagggggcactaatcccattcatgaaggtggattcctcatgaattagtcacttcctaaggggcccctcttactactatcacattgggtattaagttccaacatatgaattcaaggggaacaatgacattcagaccatagcaccagacgtctatctggggaagcccccaaatatttgtctttttttttttttggaggcagggtctgcctctgtcattcaggctggagtgcaatggtacaatcacagctcactgcagctttgaactcctgggctcaagtgatcctcctatctcagcctccccagtagctaggaccacagatgtgcactaccacatccgactatttttttattttagtttttttgtagagacagagtctcaccatgttgcccaggctgatctcgaactcctgaccccaagcaatcctcccaccacctcagcctcccaaagtgctgggatcacgagtgtgagccatcatgcccagccagccccctcatatttgatccaggcattaagcctcctggcaagaccagcagctccctgcccctgaggcagggctgagtttcagaagctgcttttcattctcagactatgctgagcctggtactgtgcacacagcacatctgaactttgttcaacatatccctgcatcaacctggcaggacggcctcaggccagggaggaaccggggagatgatgtgggatgagaagagagatcagacagaggctgtctagacacagtttcctggcaaagtcaccaagagccctgcgagcagctgtccacacctcctggcactctctgtatctgtcccgtccctgccagctccccacccgcccagtgcttcaccagctcacccctcagacactgtccaggtgggaaccattcccctcaactccctccagaacaaccagatggcacctgccagcagccctgggagccagaatcccacccacctgacccaagggctctatctgatctcagcctaacccatgaatcaggccctttggagagccaaaggaaaattgggcttccctgccagctgactatgtgacagttcagatgtcccagagcacaggaaagaggcagagacagggtcgtgaggagcccttgcttctccttcaacatctcccataaacagctggagaggggctctcacagggtccatgggaagagaccaaggaggggcatggaggagaggggagggctgagaagaccagggtgaaatggatgaggagaaggaagcagatggcagggaccctcccatctcccacatgggcccccttaggtgctactggccttgtgcaaatttgcacactcacattcacacatttctgtctgcttctctccaatcgttcagatacctagcacacaccccagcctctagaatcaggtagtcagtctagcagagtctttagcatttgacttctgggtttaaatcctggctttagcacttcctagcttcacggccctgtttaggcagtttagatgcctccctgagcttcccaggttttggggaggaataaatggcatagcagatggggaacatctagcactgtcctgctatatcatagactgtgaaagatcactgtttttgtactattggccttgctttgtagtaattatcattaacttttttttgagataaggtctcactctgtctcccagcctagtgtgatcatagttcactgccacctcgatctcccgggcttaagtgatcctcccacctcagcctcccaagtagctgggactacaggcacacaccaccacacttggctaatctctctccttttttttttttttttttttttttttttagagaccgggtctcattatgttgcccaggctggcctcccaaagtgctagaattacaggtgtgagccactgcacacggcctactttgtaataataacaaacaatacagccgctactttttggtagtttcaaaccatgatcccagaattttttgattcatcaaaaggtagaacctatgtcatctaccgttgaatccagactgtgcgattgcttgaccaatagaatatagaagaaacgttatgcgacatccaaggctacatcataaaatgtgacagagcttccactgggttctccttgtcttagagctcagccaccatacgatgaggaagcccaagtagctgaagagaggagaggcccaaacaaaggaaccaagtcccctggaccacagcctagctgagctcccagccaaccagaaagcgccaacttagcaaccgctagaggagccatctcagaaatgaattctgcagccccctggtgagctccagctgatgccacgtggagcaggaacgaactgtcccctcaacatcctgcccaaattgtggatgtgtgagcaaaataaatgactgtcatgttttaagctactacatgttgggtggtttgttgcacagccatagacaactggatgacaaacacatatctgacgctttatccgtcattgccatgctaagctgcagatatttttgtaatctacacgtttagaccttttccagcttttagagctcacacttcccttcagtacacctgcaagctccctgaattcattttcatgtaatcctccacttttttccttcagccggttcatgttaggtttctctcatagcccctaaacacagtgctcaaataccaataacctggatcccatcttgcggctctgcaggaagctgtttttgcacaaggttcttccacatttctgggaaccaggagatgtctacttcagctacaatctctcctgctcgtcccctgtcccctcgggagggtctggctcagaacagatttcactgtgggacccaagccaacctgttagccactcctaccccaggacgggtgaaacacagtcttgcagtaacaagacttacttttgaaggatggaattacaatatggaaaaaatacaacttcacaaggtacacgttcagttcatagcagcagccaagactttgaaggaagagttcaagtcgccacaaaaacatagcagagggaatagtacggattttagagccagatagtactggagacttggagactgcagggctgggagggtcacagacagtcctgagttcaaatctccactccaccactcattgcccacgtgaacttgagcaagttatttaacctctctgagcctccatttcctcaaaggcaaattggggataataaacccagtgtttgtgaggatagataggatgcatattctgctcgtggttgtgccaaccaaggacacattcagagtaaattcaagactcttcttgaagagtcacgagcacagtggcccatggcagtaatcccagcactttgggagggtgaggcgggtggatcacttgaggtcaggagctcaagaccagcctggacaacatgttgaaaccttgtctctactaaaaatacaataaattagcagggcgtaggcatgcctgtagtcccagctactcagaagtttgaggcaggacaatcccttgaacctgagagatggaggttgcagccgctgcagtccagccagcctggatgacagagagagactgtctcaaaatacaaataaaataaaataaaaaaagaatgagactcttcctactgcaaaaactgacctctggggggtggaaacaaacaaacaaatgagcaaaaaccattgttcttgcctagctgttaaagaatattgcgttttctcataacttgacacgatacagaaacatacaatgaagaatctggtgggtattgaactgtcaattgcaaaataattattcatcactgcaggtccagcctgttctccgggaaggactgtttgaatgtcctgggcctccaagccaagctcccagagcccagaccgtctctttggctaatgctggctctatctcctgaagaaaatagtttgatgcaaggaagaactttcattatcttttgccctggagcaccagtaactgtctacaaagagcagagcaagggaagaagggcagtgagaaattaatctttgagtttcctccttggtgattcatccatttagaaatgggtagattcagagaagtgtttcttcatccggtccctctgttcccatgatctcaaaaatgaaaaggcagccaaccctgatcaccacccatcagtcagcctcttttcacaagtgggaggcatgggctgtgctggaccaagtgcaaatgcaagacatgtctctaacaggccttctggaaccaggggaagctggtggcttggatgcacccactgtgaggtagagtgttatactgcagcccccataaccctgcacttctccaagtctatgattatttgactctggaatctggtgtagcacatctgctcagttgctcagtcattacttactgagcacttacaatgtgccaggacaggcagggtataaaggattgagaattgaacaaggtagtcaaggtagtatgatccctgccctcaaagagcttgttttagtatatagggtttctcaactttggcaccattgtgggctgaataattctttgttgtggggctgtcctatgtactatatttttttttttttttgagacagagtctcgctctgtcgcccaggctggagtgcggtggcgctatctcagctcactgcaacctctgtctcccgggttcaagtgattttcctgcctcagcctcccgagtagctgagattacaggcaccaaccaccacgcctggctaatttttgtatttttagtagaaacgcggtttcaccgtgttggccagggtggtctcgaactcctgacctcaggtgatccacccacctcggcctcccaaaatattgggattatgggcatgagccaccacgcccggcccactataaaaactttagcagcatccatggcctctatccactagattccaatatcacaccctttctcccaattatgacaaccaaaaatgtctccaagcattttcaaatttcacccgagggtcaaaattcaccccaccccactcctaccattcacgattgagaacctctattccaatgaaagaagcaggcagcttagtggaaagagtgtgagcttcggagccaggtgggcctgggttctcccttccactttattagctgcgtgatctttggggaatcacttctctctcttacgcatacgtagattatttgaaaattatgggtagcaatcatatttttacaaggttgttgggtgagctaaagatcaaatgtgtaaagaactgtggcaggctgggcacggtggctcacacgtgtaatcccagcactttaggaggccaaggcgggtggatcacctgaggtcaggagttcgagaccagcctggccaacatggtgaaatcccgtctctactaaaaatacaaaaatcagccaggtgtggtgccacacgcctgtaatcccagctacccgggaggctgaggcaggagaatcgcttgaactcaggaggcagaggttgcagtgagctgagatcacgccactgcactccagcctgggtgacagagcgagacaccatctcaaaaaaacaaacaaacaaacaaacaaacaaaaaacaggggcagacactgtcaacaccaaaagtcatcctcttgtcttaattcttcttgctaacagaaccccagttctttcaagggtccctatctcagaagttgggctcagtccctagagggggtgggcatgcaaaccaggtctagttaatgagctatttgagggagggggccctctgggggtagaaggttaataaaaagtttggttattttatttttatgcttttatttttttagagacaggaccttgctctgttgcccaggctagagtacagtgccacaatcatagctcactgcagcctcgaactcctgggctaaaggaaggtggggactagaagatggataagcactccacacttgttagctatctattattgctgttagcactgtcattatcagtatttttttttttttttttgacggagtctcgctctgtcacccaggctggagtacagtggtgcactctcggctcactgcaacctccgcctcccaggttcaagcaattctcctgcctcagcctcccaagtagctgggagtacaggcgcctgccaccacgcccggctaatttttgtatttttagtagagacagggtttcaccatattggccaggctggtctcaaactcctgaccttgtgatccgcccgcctcggcctcccaaagtgctgggattacaggcatgagccaccacgcccagccctttttgctttttttttttttgaaacagggtcttgctctgtcacccaggctggagtgcagtggtgcaatcttggctcactgcaacctccacctcccaggttcaagcaattctcctgcctcagcctcttgagtagctgggagtacaggcatgtgccaccacgcccagctaatttttgcatttttagtagagatggggtttctccatgttggccaggctggtctcgaactcctgacctcaggtgatcttcccgcctcggcctcccaaagtgctggaattacaggtgtaagccaccacgcacggccctttatcagtattattattattaacttttactaaggaaagagggaggcccttggccaggccgtaggattgctggccttccagggagtgtgttacccagggaagtggcataaaattacagaattgggaagctaagaggtagctctagacatcacacctctaaactttttgatattctgttgctccatctacaaatggcatttagaatttttgttcttaaagagtcacaaatcacgtgcaggaagcttgaaaccagtcctgttaccttcctatgctctgatgccacctgggaatttgagctggtgtttcgggtaagagaacagcttataaccaggcttttcaggacaatgaagactgcctttcagtgggaagatgaacaatctgcctaagtcataagaatgatacaatggactttggggacttgggggaaagagtggaagggggtcgagggacaaaaggctacaaatatggggcagcgtatagtgttcagatgatgggtgcaccaatatctcacaaatcaccactaaagaacttactcatgtaaccaaataccacttgtaccccaataacttatgggaaaaaaatctacccaaggaataaaactaaattgagactttaaaagcgagacattaaggaagttgactcttagctgacctggacacaggcctatcatggtaagtgctgcaggtgaacaaacagcagcaatttgacccttcttccttatacatcaaattcctttttttaaaaaattatttttgagacagagtctcgctctgttgcccaggctggagtgcagtggcacgatctcggctcactgcaacctctgcctcccaggttcaagccattctcctgcctcagcctcccgagcagctgggattataggcacccaccagcacgtccggctaatttttgtatttttagtagagatggggtttcgccatgttggccaggctggtcttgaactcctgacttcaggtgatccacccactttggcctcccaaagtgctgggattagagacatgagccaccgcgcctggcccaatttcattttttttttttttagacagagacagtgtcttgctctgtcacccaggctgcaatcagtggcgtgatcatagctcactgcagcctcaaactcctgggctcaagagatcctcctgcctcagcctcctgagtagctgggactacaggtacatgccaccacgtccgactattatttttattttttgtaaagatggggtctcattatgttgcccaggctggcctcaaattcctgggctcaagccatcctcccacctcagcctcccaaagtgctgggattacagatgtgagccaccacacccagcccaaattccaattttctaaagaatctggggctctctgtgttttaagactattaggctctccccagtttcaggggatgaatcttgagcagtctgatggagggctggcaagccattgcctaaacccggcccaccacctgcttttgtacggctcaggagctggaaatggcttttacatttttaagtagttagaaaagatcaaaagtgtaataatatctcctaacacataaaaattagatgaaattcaaatctcagtctccataaataaacccattcacttatttattatcatctatagctgctttcacactgcaacagcagaacagagtggttgctacagaaactgtgtggccacaagcctgaaatatttattctctggctcttcagaggaaaagatcttaggaagccagaggttctcaaactcagtgtccatcagaaacccccggagggcacgtttaaacatagactatgggccgggcgcagtggctcacgcctgtaattctaacactttgggaggccgagagtttgagaccagagcattgtttaagccaagagtttgagaccagactggacaacatagcaagaccctgtctctacaaaaaataaaaaaaatagctgggtgtgggggtgcacacctgtagtcctggctacatgggaggctgaggcaggaggatcgctcaagcccaggagttggaggctgcaatgcgctatgatagtgtcactgtactcctgcctgggcaacagagaccccgattctagtaaataaataaataaaaacatagatcccaccccagagtttctgatttagtaggtctgaactggggtctgagaatttgcagttcttaaaattgcctagacatggcagatgctgctggcctggggatctcactttaagaagcactggtctaaggcaaccttgggaattccattcccttgccagcaactggcttagaaaagggcacgtgatacatttctgaccaatgagatgaaggagaagtcagctggcagcttctgagaaaatgagaaaatgatcataaaaagggacagatgggctgggcgtggtggctcacatctgtaaccctagtgctttgggaggttgaggcaagaggatcacttgaggcccagagttcgagaccagcctgggcaacagagggagacctcatctctagaaaaaactctaaagttagctgggtatggtagcatgcacctatagtcccagctactcaggaaactgaaggaggatcacttgagcctagaagttcaaggctgcagcgagctatgattgcaccactacactccagtctgggtgacagagcgagaccctgtctcaaaaacaagcggggaacaagtggaagaaggctctcttctctcttgtccatattatcttgagaccatgatggggtgtggctgagggcaagagccagctgctaagaatggaatagtggaaaagtggaaggaaacaaggcccaccattccacaatggagccactgaatcaattaaccacatggccccctgcagagaaacaataacttccattagcatctacaccacttccagttgggttctcagtgatttgaagccaaacacaacctacctggcaaccctacaacttcacccctcaccactgtttggacactaccaaacttaggccatgatgattaaggccaggcatgagctccaccctccctgccaccctatgaggaataaagcagatatggggaaggtgaaagggcatgatttagggatccataaagccccagattggagccttagttctacaactcaataatggtgggctagagctctatgcaccccatactctaggatggggactcatacctgcatggttgactagtgcagtcatgtctgtgcatctgagcagttattttcttctctggaccattattaaccattagagctagcatttgtccccaggtcccgggcactgtgcaagtcttcacctacattatcctactacctcataagatagtttggatgtgtgtcccctccaaacctcatgttgaaatgtgatccccaatgttggaggcggggcttggcgagaggtatttgggtggtgggagcagatccctcatgaatagcttggtgccctccctgagtaatgagtgagttctcactcttttagttcacggcgaggtctgattgttaaaaaagtgtttggcacccttcctgtctctctctcacccctcttctcaccatgtgacacacctgctcccctttcaccctccacagtgaagaaaagcttcctgaggtctcaccagaagcagatgctggcatcatgcttcttgtacagtctgcagaaccgtgagctaaacaaacctcttttcttataaattacccaccctcaagtattcctttatggcaacgcaaaacaggctaagacacctcaatggactaatacataacagccccataaggtgagtgccaccatctcccccaccttacagatcaggaaacaggggctctgaaaaactgtggctcactcaaggtcataccgcttgttaagtgcagagataggattccaactcagaggcatctggctcaagaacccacgtgtctgtgtttcaggttgcaatgctgaggttaaacaagaggatgtgtgctaggagccccagcacaccacaggggctgggaaacgttattgcatcgagtttgagtccaacacacggtctcattcctccacccaccactcagcctagaaaaagggtcggaaggttgactccactttcagaagcttgccagctccagccagtcagccagagtgaagctgacaagagcaatgagggaaatacggaaagataaatccagatgtggacaatgagaccgtgtcccctgagaactgtggtggcagagggactcaaaggtccaggcctgctcggcgtggctgcggcttgggttcctgggccacagggctgccttacctgccagtttccatgcctggctgactcccctcactgcccctctggcttccacaccagcccactgatgccaccccagagaactcggctgtttgccttgctcctctagagggcaggtggatgcggtgaaacgggcagcgattccagggccatcacaactcctggctgaaaccaaacatgacagatttaccattgggcaggctgctccatttattatttaacgctcgcaataaatatttgcatgacccagtgctggagggaacgctctgtgataactcactgcattttcctgccaaacaccagcacagtcggattccgaagctgcagcagagaatattttatgctattctaaaaatccaggtgatggccccttgttagaaaaccttttctcatccatttccatagaggaaaaaaggagcagggagaccttagctctgagaagcaactagaggaggaggaagaggaggaggaagatgctgacaggtgacatttacttagcacctactgagtgccaggccctaagctaaggacttcacactcattcattcaacacctctctctagagggtagggttgccagacttaacaagtaaaaatatacgacacccaattccattttaaatccagtgaaataaggaatgattttttaaatacaagttatgtatctgatgtaatactggaaaattattcaatgtttatctaagcttcaaatttgggtgcagtggcacgcacttatattcccagctacttggaaggctgaggcagggaaatcacttgaacccgggaggcagaagttgcagtgagccaagatcatgccactgcactccagcctgggcgacagagcgagactctgtctcaaaaaaaaaaaaaaaaaaaaaatagaacaaactgggctacaaagttttgccaggcatggtggctcacgcctgtcaccccaggactttgggaggccaaggtgggcagatcacctgagatcaggagttcgagaccaacctggccaacagggcaaaaacccatctctactaaaaatacaaacattagccaggcctggtggtgcacgtctgtaattccagctactcgggaggctgaggcatcagcatcacttgaacctgggaggcagaggttgcagtgagccaagatcatgccactgcactccagcctgggggatagagtgagactctgtctcaaaaaaaaaaaaaaaaaaaaaatgtaactgggcatcctgtttgtatctggtaacactccttaaggttggactaactatgcgaagacactgaatttaaaaggcttttcttttcatttattttttaagagacgtatctgtgtaactcaggctgcagtgcaatggctattcacagggatgatcagggctcactgcagcctcaaactcccaggcttaagagatggtcccacctcagcctcccaagcagccgggactacaagtacatgacactgcgtctggtgttcagtggtgcaatcacggctcactgcagcctcgaactcctgggctcaagcaatcctcttgcctcagccaccagagtagctagaactatgggtatacagcaccacgcctcgctatttttttttttttttttttttttttgtagagatggggtctcaatgtgttgcccaggctgatctcaaactcccggtctcaagtgatcctcctacctcagtctcccaaagcactggaattacaggcatgagccaccacgtccagcctctttttttctttaaggaggcttattttttagtgtgggttagggaagagccatgtgtgaagttgactctggagcagagatgtcaaagatgagaaagagctacccataacaaaaaaatggggaacaggattcctggcaaagaccccacaaagaccctggggctggaaaccatgcggggcattggaggagtcaagggaggtgacacttttggagctgagtaatggagaggagagtgacaggagcagactgcacagggccttggtcacaatgaaggatttggatgctattctaagttaaagggaaggcatgggaaagcttttcagctggaagtggccaaactggggaccgactctggctgtacggatttctgagcctggagatggcacaaaggacctgacattggcaggaaaagaaaagaggaggaacaagaacacaagaaattgccttaaaagggagctggtcaggtctcaccagaaaaattcacgcaataacaaaccagccgcccacaacagacatctccacattttcccagagctgtcccccagccaggcggccggagtgaggggatgccgacggtgacaatgctatcaatttccattttgcttttgccaaatacggaaaaggacacttcaaagacttttaaaaataacttccaaacaactcaagggtgaaaaaaaagaaagaggtaaaaaattacagtctgcctgcttgagaatagcgataatgaaaataagtgatagaaataagaacagctgcttttgcacacgttatgtcatctgctccttagcactctatgaagcaggcagaacaggtcatggtatccccatttcatagataaggaaactgagacccagaaacataggatacaacagagaggaaatgatcaggtgggtgagaagctatgtttgtctggccccaaagcctgggttccccaaagccctctgcaggctgatatgagcctaaccccagcccggctcctggctctcagccatctcatcctcccagcccagctatggggagcaagatacctcctaccatgtcccttgcagccttcctccctcgcctgcaggggcttcctgcctggaaagcctgttcctttgcccttcttctccagaggattcacgtacctcagcacatgttcgacgacaaagtcacagcactgcagggacacctcccctggagaggaacacgatggtagagtggaaggggcacagctttgccattagaatgcctgagttcaaatcccagctcaatcaccaactggttgggtatccttaagctcttccaaggagtgggggataatccaatccatccccacaggatcctggtggggattaaatgagatgctgtatgtaaaacatcaacacagggccaggtgccatggctcacacctgtaacaccagcacattgggaggtggaggcaggagaatcgcttgaagccaggagtttgagactaacctgggcaacatagccagacccctatctatacaataaaatgtctttttaattagctgggtgtgatagcccatgcctgtaatcccagctacttgggaagctgagacaggaagattgcttaagcccaggagttcaaagctgtagtgagctatgatcatgccactgaactccagccatggtgacagaactagaccccaactctaaaaaaataaaaaacattaaaaaaaaatcagcacagtgcctggcatacagtcagcacctaataagtagtagctgttttttgttttttgtttttttttccatctctgaaaaaaaaatcagccattttttaaaattagctgagtgtaatggtatatctctgtaatcccagctacttgggaagctgaagcagggggactgcttgaccccaggagtttgaagcttcagcgagctatgattgtgccactgaactccagccatggtgacagaacaagacccaatccctgaaaataaataaatcaattggcacagtgcctggcatatagtcagcacctaataagtagtagctgttagaataattacaaaaggccaggcgtggtggctcacacctgtaatcccaacactttcagaggccaaggagggtggatggcctgaggtcaggagtttaagaccagcatggccaacacagtgaaaccccatctctgctaaaaatacacacacacgcaaaacaaattactgggcatggtggcacatgcctgtagttagtctcagcttcttgagaggctgaggcaagaaaatcacttgaacccaggatgcagagattgcagtgagccaagatagtaccactgcactccagcctgggtgatagagcaagactttgtctcaaaacaaacaaacaaacaaaaacaaaaaaaacactcaaatcatgggattgagtgttcaatcattcaatcaatttttattgaatgcctactacatgctaggtacttagggatataacaggaaataagacatacgtgattctaccttaatgaaacttagaagaaggaatatacttatggtatagtgaaagaaacatatttattagaaatcaaacataaaaagcataaaaagtgttgaagagtgctctaaaagaacagaggtttctgtgaatcatctactttatttatttatttatttatttatttatttatttatttattttgagacagagttttgctctgtcacccaggctggagtgcagtggcgtgatctcagctcactgcaacctccgcctcccaggttcaagcgattctcctgcctcagcctcccaagtagctgggattacaggcacccgccaacatgcctggcttatttttgtatttttagtagacacggggttttactatgttggccaggctggacttgaactcctgatgtcaggtgatctgcctgcctcagcctcccaaagtgctgggattacaggcgtgagccactgcacccagcccggaatcatctactttagactgaggcatctgagacgcgctcaaaggacatttcagtggagaaccatgggtgtgaaggagggagtcacacggagactgggaagggacggacctttgtaggacagacggcaacacgtgcaaagcttgtgctgggaggtgaagggagaacaactcgctggaggaagcaaggaagaggagatttagttagagcagacagccaggatcagagcatgcagggtctgatcatttatttccaagttattctgaaatcaaagagaagcaggcttttaagctaagaatgcagcacatcggctggcatagaataagagttcaaaaaaagtgtaagctcccttccctatcctgaaacaaccaaagtaaataaaaatggcccctctgttttgaattatttatttatttgtgctttcaaactgttttcttaaaaaaaaaaaaaactacagagtagtgagtgggggcgggggggtaaggggtggaatactcaaaacgtgttcaaaatcaaacgagccagaaactcctcgctggaaattttctctctagatctctgcaggaatcagtggaaccatgagagacagagtcgaaagcagcagagcctggaattatttctctaagcaagacccagacgccacgcaggtagtgaaattgctcctgccccacctccatccttgctgcctatctgagaacagagtctgccaacccctcctgatgagagactgacccctcatagccactgcaggctggaagccataagcttaaaccacttccataccatgaaagcaaaatgtatggttggcaaaaagcaaaaaaaaaaaaaaaaaacaaaaaactggttactggcgagtgcagaatcacagtctgggtcgatgacaaattatccagcatgaatcttggtgtgacttaggcccttcttagtcctctaaaattcatcacattttgtttattcgttcactacccacttacagtagatgccaagaaatatatataacaagattatagatataaatttaaaattaggactaaagaaagataatctagaataagaggtaaaagcagaacagagcaggatggaaggtagaataaagatatacaggccagaaggccagttactaaactggatttgagaacatggcgctgagttccctggtggccaagtcaaaaagggcagttggagatgttctcatggtccacaaaaagaaacacacttaactttgcagaacaagcactgtcctgccgtgtgacctcagataagtgatttaacctacttagactcagctgcctcattgccaaaaagttagtgaaaactattgaatgtttaggtaaaaagttgtaataaaaaacaagaatgggaaaggattccctatttaaaatggtgttgggaaaactggctagccatatgcagaaaactgaaactgggccccttccttacacctgatacaaaaattaactcaagattgattaaagtcttaaatgttagacctaaaaccataaaaacccaagaagaaaacctaggcaataccattcaggacataggcatgggcaaaggcttcatgactgaaacaccaaaagcaatggcaacaaaagccaaaattgacaaatgggatctaattaaactaaagagcttctgcacagcaaaacaaactatcatcagagtgaacaggcaacttacagaatgggagaaaagttttgcaatctatccatcgggctaatatccagaatccacaaggaacttaaacatatttacaagaaaaaaacaaccccatccaaaagtggccggaggatatgaacagacacttctcaaaagaagacatttatgtggccaacaaacatgtgaagaaaagctcatcatcactggtcattagagaaatgcaaatcattgtcagagtgctcagagagggcatgttccctgggtcttggtggatttagaggtcaagggaccatttctggaagctcactgtgtgccagggcagcttatatcagagctccgctctttttctttctttttttttttttaagacagagtctcactgttgcccaggctggagtgcagtggcaccatttcggctcactgcaacctccacctcccgggtccaagagattctcctgcctcagcctcctgagtagctgggactacaggcatgcaccaccaccacacccggctaatttttgtatttttagtagagacggggtttcaccatgttagcaaggctggtctcgaactcctgacctcaggtgatccacctgccttggcctctgaaagtgctgagattacaggcatgagccactgcgcttggccagagatctgctctggaagaccccccaggccggagggcactgccacaagcagacagtatggcgagggtccctatggccacctggcaggcgaggtggattctggagggaggtggcctgggagcaggctgaggatggggtgagggcatttgagcagcagagtgtctgcgtgaccgggcataactggagggacagtaaatgactcttgtgtgagaggatgagggaggggtgagaggggctgactacccccaggacttggggtgcagtgagactccttagctttatccagactcatgggagccatggaggtttgaggcagaggcgtgggctgctgggagagtgaggactcaccatccagagaggaaggtgaagctttcaactctaaatgccgttttattttcgtgtgttttttttttttttttttttgagacagagtttcactcttattgcccaggctggagtgtgatagcacgagctcggctcactgcaacctctgcctcccgggttcaagcgattctcctgcctcaccctcccaagtagctgggattacaggcatgcgccaccatgcgtggctaattttatatttttagtagaaacagggtttctccgtgttggtcaggctggtctggaactcctgacttcaggtgatccgcccgccttggcctcccaaagtgctgggattacaggcatgagccactgtgcccggccccaaatgtgttttacattttcttcctatttgattcatctttgtcgtgcaacataaatatgctacttttccactgataaaaagacaaaatgaaatttaaaattggcctggacttctcaaaaaagtcagtgtgatgaaaacatgttctagataaaacagaaatgagactgcgcatggtggctcatgcctggaatcccagtgccttgggaggccaaggaaggagaatcacttgaggccaggagtttgtgaccagcctgggcaacatagtgagaccgcagatctactaaaaatttaaaaattagctgggcatggtggtgcgtgcccgtatgtctggaggctgaggcaggaggatcacttgagcccaggatttggaggctgcagtgagctatgattgtgccactgcactccagtgtgggtgacagagtgagaccctgtctctatttaaaaaaagagagacaagatgatcaggatgagcgcagtggctcacgcctataatcccagcactttgggaggccaaagcaggtggatcacatgaggtcaggagtttgagaccggcccagcctagatggtgaaaccccgtttctactagaaatacaaaaatcagctgggtgtggtggggcacgcctgtgatcccagctactcgggagactgaggctggacaattgcttgaacctgggaggcagaagttgctgtgagcaagatgacaccactgtgctccagcctgggcaacaggaatgagacactgtctcaaaaaaaaaaaaaaaaaaaaaagggatgatcaaacacaatgcatcaacctcccggagccgtataaaccctaaacctaaaccaggaagcaggcaagcctgtgtgtgagtttccactctattgctggtaccactcggctctggcaacccggaaggccaccttcccctgttgttactgtgtaaggaggaaggagcactggtttgcaagtcagaagcctgggttgaagcctctgcttgagttcctgctggctgtgggaatgtggggttacctttcccggctggcctcgtttcctacatgtccaatgcaggggttccagtcacatgcattgggcaccattacatgtccaagctgtgccaggatctagaaaaatggctgggctcaggccaaggggccttcctgtctggcagtgaaaataagaggagataccaagggccctgagcctgagtctggaggaaaagtcatgagcacagggcagtgccagggcctgggagctgccacagaggagcccaccttggtgacagacacctgtaggctcatatgatgccgagtgcccaacacagggaactggacaaaggtttcatgcacgactcttttccctccttggctaccttgaggaccttgattataatagttagccttttttttttttctttttttgagactcttgctctgtcgcccaggttggaatgcagtggcaaaatcttggctcactgcaatcttcgcctctcaggttcaagtgactctccttcctcagcctccctagtagctgggattacaggcgtgcaccactatgctcggctaatttttgtatttttactacagatggggtttcaccatgttggccaggctgatcttgaactgctgacctcaggtgatctgcccgcctgggcctcccaaaatcttgggattacaggtgtaagccactgagcccagccggattataatagccttttcatgcaccaggggctttatactcattatctcatttcattcatatgagttgaagtcagcttatcccccatttcacagatgaggaaaccaaggcccagagaggttaggaatttgtccaaggtcacacagccaggaagtaggattcaaacccagacagccaggctgtaatacctaggctcttctcaggctcatgcccttcccaggggtctgggaagccctgacctgcagcctgtcacctttgtttaccccccagcctccaggatattacgtgtgcaccggcgtgggatcctggaactggcaggaattgtgggttgtgttggtccctgaactcccatcgcctatgtgaaatatggttgcttttgtggcttgggaggccatggccagccccgcgatgccattgactggtgagtgcatgcctgggaccaggccacaaaatccctcacactctggggtagtcaaggcttatgaggaagtacccaaaactgaagctggggtttggtccagggagatcccagtgtgcagtactactttgcaggcaggcagaggcctcttggataacatggccagtgaagccagatcttggtactagctgtgccttaccctggccatgggctgaaaacgttgccttaaaaaattggccaggagcgctggctcactcctgtaatcccagcactttgggaggccgaggcgggcagatcacttgaggtcaggagttcaagaccagcctggccaatatggtgaaaccccatctctactaaaaatgcaaaaattagctgtgtgtggtggcaggcatctgtaatctcagctactcgggagactgaggcaggagaattgcttgaacccgggaggcagagtttgcagtgagttgagattgcaccgctgtattccaacctggacaacagtgccaaaccctgtctcaaaagaaaaaaaaaaataatataaagtgaccaggtgtgttgactcatgcctgtaatcccaccactttgggtcgaggcaggaggatcactggagcccaggagtttgaaacgagcctaggcaacagagtgagaccctgtctctatattaaacacacacacacacgcacacacacacacacacacacatacaaaggcagccagactatgcactaggaactgccctgggaatccctttgtgttctcacaacaatcccatttcacatgaagaaacctaggcacagaaatattcagtaacgtgtccaggtgcggtggctcacgcctgtaatcccagtactttgggaggctgaggcaggcagatcacgaggtcaggagttcgagaccatcctggccaacatggtgaaaccccgtctctactaaaaatacaaaaattagctgtgtgtggtggcaggtgcctgtaattccagctactcaggaagctgaggcaggagaattgcttgaacccgggaggcagaggttgcaatgagccgagatcacaccactgcactccaacctgggtgacagagcaaaactccgtctgaaaaaaaaaaaaaagaaatattaagtaacttgtctgaggccacatagttaccaagacgtgggagctgggacttgaacccaggcagtctggctggattcatgcctgcagcctctgcactcctgctacttactgtgtgagaagcgtctgttctgtggaaggttgtgggctgagatctttccatgacttccactcatttacccccaaggctgttcttaaagacgggcatgacagttatgcccattttacagatggggccctgaggctcacaagggcacgccactcacccatttccacaaagctatagttagttagcagagggcagaattcggccgcctctcccctagcttgtaggctgtgattgacacagaggtttttttgttgtcgttgctgttgtttgttcctttttcttttttttgagacagggtcttgctctgtcatcccggctggagcgcagtggtgcgatgtcagctcactgcaaattctgcctccaagatgcaaatgattctcgtgcctcagcctcccaagtagctagaattacaggtgtgcactaccacgcccagctgttttttgtagagatggggttagtagagatttgtttaatagagacgggtttcaccatggtctctactaaaccctgtctctactaaaaatacaaaaattacccaggcgtggtggcacatgcctgtagtcccaggtactcaagaggctgaggcaggggaatcacttgaacctgggaggtggaggttgcagtgacccaaaatcatgcactctagcctggggtctcgcttttgcccaggttagagtgcagtggcacaatcatagtggctcactgcagcctcaaactcctgggctgaagggaatcctcccacctcagcctcccaagtagctaggactataggcatgtgccatcatggcgagttaattttttgtgtgtttttattgtctcgagacagagtcttgctctgttgctcaggctggactgcaatggcgtgatcctggctcaccgcaacctccacctcctgggttcaagcaattctcctacctcagcctcccgagtagctgggattacaggtgcgtgccaccatgcctggctaatcttgtatttttagtagagacagggtttcgccatgttggtcaggctgctctcgaactcctgacctcgtgatccacctgcctcggcctctcaaagtgttgggattacaggcatgagccactgagcctggcctggtgagctaatttttaaatttgttatagagacaagagtctctcttatgttgcccaggctggtctcgaccccctggcctcaagtgatcctcccacctcagcctcccaaagtgctgggattacagatgggtgtcaccgcacctggcctctgaggaggatttcattataaacctgccctgaagggagggaatccaattttacgagagggtgtagcctggtgaggcctggatgacctccggaggcaggggcttgtgcctgggctgaggcctaagggacaatgggcagacatgaagttgccccaggcagagggtacagtgtgggcaaagtcaggaagtggcagggcttggatcactccaggaagagagaggagtcatgtgtcacaggagctcaagacccagagagggaggcaggcaggcaggcagggaccaagcttgggcacagccaggaaggcagagggcatggtggggccaatggaatcattacccaagacggggattttcagggaaacagcttagataaggccaggcgtacagtagctcccacctgtaatcccagcatttgtggaggctgaggtaggaggactgcttgagcctgggagttcgagaccagcctaggcaacatagtgagaccccatatccataaaaaatttaaaaaaggagtctgtgttcctgtagtagcagacttgggaggttgaggtggcagtatcacttgagcccgggagttcaaggctaaagtgagctgattgagccactgcactccagcctgagcaacagagagatacgctgtctcaaaggaaatacaaattaaaaaaccagccaggcatgctggcgtgtgcctgtagtctcagctacttgggacactgaagtgggaggatcgcttgagcccaggagttcaaggctgccgtgagctatgattgtgcctctgcagtccagcctgggcgacagagaaagaccctgtctcttaaaaaaaaaaaaaaaaaaatcttagataagaggatgctgtgcctccctgggggtcttcagtcacccatagtcctggcaagagaggagggccaggagagagcttcacccacctgctgtcctgcccatgtgacatccgcaggtgctgccatggccacgactgttgttacactcgagctgaggaggccggctgcagccccaagacagagcgctactcctggcagtgcgtcaatcagagcgtcctgtgcggtgagtccccagcagcaccatgccacccaccccgagtatcccctgggcaccctggcatagccagatgacttccgtgcccctgttgcaataaccactgcttccaagtctctatagaccaccccttgggtatatctaatgtaagtgatatttattttatttattttttgagtcagtctcgctctgtcacccaggctagagtgtgctgatgtgatctcggctcactacaacctctgcctcctgggttcaagcgattctcatgcctcagcctcccaagtggctgggactacaggcatgcaccatcacgcccagctaatttttgtattttttcagtagaggtggggtttcaccaagttggccgggctggtctcaaactccccacctcaagtgctctgcccgcctcggcctcccaaagtgctgggattacaggcatgagccgtggtgtctggccctaatgtgagtgatctttaacactgagcacttgaaaaagaaaaccctgaagaaacctaattctttgatgtctggatgacaaggaagaagatagaaatggcatcagataataaacagtgtaaatgtttatcagaaagaggctggtggtcgggacaagtaggaggattgcttgagtccaggagtgcatctctacaaaaaagttaaaggattttttaacattggccaggcgtggtggcacacatctgtgatcccagctacttgggaggctggggcaggaggattgcttgaagcccaggaggttgaggctgcagtgagctgtgatcgagccactgcactccagcctgggtgacagagcaaactccagtctcaaaaaaaaaacaaataataatattttacataaccaaccacttctaaagattaaaaaaacccctatgattaaaaacctcaggtccctcaggcaatcataccagatattgaaacaaagcaataacataaggactgcagtattcattttatttttatattatttatttattcttccttagtttcttgagattatcatccgctgagggtggaaggggagtgagcagacacacttgggaggtgtcttgagattatcatccgctgagggtggagctgagggtggaaggggagtgagcagacactcgggaggtgtcttgagattatcatccgctgagggtggaaggggatagagcagacactccgcaggtgtcttgagattatcatccgctgagggtagagctgagggtggaaggggagtgagcagacactcgggaggtgtcttgaggctcagggagttatcaattatagaatgttgttgagttggaggaggtggctggtggcccatcctgttttttaaagtttcagctgtgaggtagggccagtagggcaatcctgaagaatgacgatgctccgctgccgccattctgacctgtagggccaaaggagggaatgttttcacacatattcatttgatggacaaaattaccgccaccaacacagtctgcaccttctgttgctggtgatagatttttgcacctttccatcctccaggtttcaaaatagcagtgtcagtgtcataatatcacccttccactgagtactgccgacagctggggggtaaagaaaagtcattgggacacactgttgtctccacatgccactgtgtctgtctgcaaatgtaggcaggctggggtcctgccccagggaagacagagtcataacagagtaataaagaagcatgtttgagacacaggagtgtctatgtctatcctcattcctccctcacagccatcaccagagcatgtttcttgcaccaggtcaatagacagtaagagacagtaagagaggcatgaaaagcccattgtccacacatgttgcagcttctttttggagaatgttttccaggccttttatgttctgtctctgattctcagaactctgcaaggtcagtgtgaccaccctgctccaaatctaagaaaacagaggtttccagaggaaggagaaattgtgcccagggtcacacagcttgcaagaggcagagtggaagttgattccagctctgcctgcaggaccctctcatttcccctctgtttcccttcttgacaaaggatcttcttcactctggaggtgccacccatgagaacaaagagctctggagagatgtggattcctgaagagctgcaggggaactgggagagggttttctgacagaacaatcttacctcaagaagtcagttaggcatggctgtaatatttcttttcactcccaggtaataccaaattgtaagtgcactaggacctaaagaatacttttgtccatggaaaaatgaggtgggaattctaaacaaagcaagttttaaaactgtgtttcacttcaagtgtacaagtcccatcgcgtgtaatcataggactcggcagcttttgaaggtacagaggccacacaagaaccagcttagctgagcatcatttaaggccttcatttggaattgtccctgtgggtaataagttacattcactcttcactaatttacagtcagggcccatttgctattacaaatacggaacctctgacacttagaatattagatgggggccccactgggtggggatgaaggtgtttttgcgcaacacggttaccaacagggatgggactgtgatgcttgtaggcagccttcctctctgccatctccctctgcagggcttgagcacagagccgtagggagaaaaatgtatccatgtcctgacctggcagactatgtccaaaagcaaggaaaacaagcaaacttacccggttgcaaagaggctttcttgcagaaggggtgatctgaaaaagccaacacatgagaaattgaatgttgagagagtctaagggccgtggcatcatctgcatcagcactgaactatcctgcaactgcggggaggaagctccttactttgcatctgtagtagtcctctgcccgccgccgcaacgcttgcgcacgttgaaacatttccctatggattacaatcactttcatcagataaagcaccactttcaggatgattttaaataatctgccatgtttctgttatcctcacaactgtacccttacacaatctatctctacctagaaaacgtatttcagatggctgtaagagtacagtctgagccggtcacggtggctgacgcctgtaatcccagcactctgggagggcgaggcggatggatcacgaggtcaggagattgagaccatcctggctaatacggtgaaaccccgtctctactaaaaatacaaaaaattaggcgggggtggtggcaggcacctgtaatcccagctactcaggaggctgaggcaggggaatcacttgaacctgggaggcagaggttgcaatgagccaagatcacgtcattgcactccagcctgggtgacacagcgagactccatctcagaaaaacaaaaacaaaaacaaaaacaaaaaaaactgtacagtctgatccaaactgttgctgtattgattcctcctcttgcttactgcctgctgacttctgagatgatagcttccttccccattctcagtatatccctaattcatccttcattgagcatcttttatcataaagctgtattctctttgtattaatatctttaccgtgtttcacagggcagaaacagctgggcttataaacaggcatagtccttttgaaggatgtggttgatcctacaacaacacactttcctaaggatgacaacaactcaccccacccctagaatggctggtatgaaccgagtttccacacagtctagctggcaatggggtcaggagccgttttgctacttcacatcttttggtcactggtaaatattaaggtactttgttttctgttttgtgaactctctctctctctcacgatatgtcttctgaccatttgtttctatttctgcatttactgggtctaaacattgtacaaaggttaaaaacaacactccaatgggcgtttcccaagagggtggggttcagtttctgaactcacatgtaggtgtgtatttctttcatatccaatttcccgttttcctctgcctctgacacctgcctctccttttctccgtgctcacgttctttcatgcttagtttcctcagactagaagggagagaaatgcacacacatgatccaccagcccgtgtgggattccctctgcccttctggcatctgaaggctgattcaaagatcccccctgcaaccttcccacaaatgaaccaactgattctcacaagcaaagggagaatggacacctcccattgagggacaaaaaaaaaatcacactctggcctgctggcaagtcacctgtcatttccagctcatcttcatagttccatagttagtcctattctttagtaaatataaagactattaaaagcttctatgaggtgcactatgtgtgtctctggggtcagtcttgtgcttgacacagcgaaagctcattttagttcagtgtgaaaaaccagacctcaccaattcatcacaactaactccatcggaggcagaggattgctcctcatctgactcctcctgtgtgagacctgattctcagtcagaggctgatgccggaactgagaccatcagccatagagagatccttccagaatatggtgtcattaaccccgcagttcactactgcactttgccatgattcaggactggaactcttgtcatcgactttaaagatcctgaaaaggcaatctgaatgctgggcgcatctattgaattagaaatgatcggaatggctcctaagtcagggtgttatgtcctgaaaataggtgacaactgcaaaccatccaccctggtgttgactgactttaacaaggttcagttcacagagattgagggcagaaaaaggaaacggcctcaaaagggtaagtttgctgtgttgccctcacaccacttgattcatggtcctgatcctaaggatctcacctgatacttggttttataggaaggatgtgtaaaattcccagaatgctaggaaacagggatgaaaacacttcaaagagaaagttaatgaacttgtttctgaccacagggcatccttcagcacatgctgtctggagtggcctcaaacaaggtgtgtgtggtgaggtgctgacaatgcaatgggagcagggtcctgtccccacgctaaagaagctcacagtttaatgcaaatgagaagccagtgaggacagcactactcctgctgtgcacttgggaactagaaacacaaaacctgactctggagggaagctaaggaagcattctactcttgagttgacataagtgcatctgaagcttctgatctccgatgagaacaatgggggacaccaaacagaatataaaacccatgactgaatacatcaaattgctcacatggcagtaaacagacatgaggtgaagatggagaagaaggaaacccaggacgaaagtcagcctcgcatttggaacccatttccctgagtttcattgctgaattccagaaggaactactgagatgcaaagaagcacagcagcttttgcacacatgtgtggggttagatggaaaacaagtggattgagggtctgccaatgaaagcgacccatactgaagtccactggctctggttgagacccagaagagtcatgcatcagaatagaggtggacaggaaataccctggcctttgtagggactgagcctgcactgacgacctcaattgcagcctgtatggaggacccctgaccatcccccagaagtagactcccatctcttctgcagcaagataacatgctactaggcctcaattcattgctaaatattttttaacaagtatctcacatttaacaaaaaaagatcagtcatatggcagcaaaatacaatgtaatatgaccaaaacatgaaagactgtgaaaatgaatctggaggtgacccgagcattgaattcaacaatccaggctgggtgcggtggctcacaccgggaggctgaggtaggcagatcacctgaggtcaggagttcaagactagcctggccaacatggtgaacccgtctctactaaaaatacaaaaattgggctgggcacggtggctcacgcctgtaatcccagcacattgggaggccgaggtgtgcggatcatgatgtcaggagttctagaccagcttggccaatatggtgaaaccccgcctctactaaaaacacaaaaattatccgggcatggtggcatatgcctgtagtcccagctactcaagaggctgagggataagaatcgtttgaacctgggaggcggaagttgcagtgagccaagatcttgccactgcactctagcctgggtgacagagtgagactctgtctcaaaaaaaaaaaaaaaaaaaaaaaaaaaattggccaaatgtggtggcacactcctgtaatccaagctactcgggaagctgaggcagaattgcttcaaactgggaggcagaggttgcagtgagccaagattgcaccacagcactccagcctgggcgacagagcgagactctatctcaaaatttaaaaaaaaaaaaaaaaggctgggtgtggtggctcacgcctctaatcccagcactttgggaggctgaggcgggtggattacctgaggtcagaagttcgagaccagcctggacaacatggtgaaaccccatctctagtaaaaatacaaaaattagctgggcgtggtggtgggcacctgtaatcccagctacttgggaggctgaggcaggagaattgcttgaacccaaaaggcagtgagctgagattgtgccattgcactacagcctgggcaacaagagcaaagccccatctcaggaaaaaaaaaaaaaaaaaaaagagagagaaaggaaaaccaatgccagtactagcaactcctcttcccctgaaaaaatgacaaacaagaatgtaggaagggaaaggaattatacagcttaaactaatgaagcagaaaggacaaactcaattttgaacccactgaatttgccacaaatattgtagaaaatattctcaaggactttacagttgtctactttgattggcacatggttcatacaacagtatttgtgtcaaggcacatcttactgttctttggcggtcttcctctttccattgattttgtcatgacggttgacttttgttgtcaccttcatcttacagattttagctcgaactttggtttccacctgtctccataaagtaaagatgtcttccaggacaattttaattcctggaaaggaagaaactcttttctttgtgtgcatacaaacggacctcagcccttggtgagagtgaggagaggagaaggtgagaaacctgagggcaagaagctgttctttccctttccagggcaaactcatttccacactatggggactccaacagagccataccttcctgtctacggcggttggacctcctggctctctgctgtacatccgtggatccatcatgtccattttgagacgggaagatagtcttcaggaaagacacctaggaaataataatataagaatgacggctgggcacggtggctcatgcgtataatcccagtactttgggaggccgaggcagggtggatcacggggtcaggagttcaagaccagcctggccaagatggtgaaaccccgtctctactaaaaatacaaaaattagccgggcatggcagtgggcgcctgtaatccgagctactcgggaggctgaggcagagaaccatttgaagctgggaggcagagtttgcagtgagccgagatcacaccactgcactccagcctgagcgacagaatgagactctgtcacacacacacacacacacacacacacacacacacacacacacacacacacaaagaatgacatgaggctggcacggtggctcactcctgtaatcccagcactttgggaggccgaggcaggcggatcacctgaggtcgggagtttgagaccagcctcaccaacatggagaaacgctgtctctgctaaaaatacaaaattagccaggcatggtggtgcatgcctgtaatcccagctagtcgggaggctggggcaggagaatcacttgaacccagcaggaaaagattgtggtgagctgagattgtgccattgcactccaacctgggcaacaaaattgaaactctgtctcaaaaaaaaaaaaaaaaaaaataggccaggtgcggtagctcacgcctgtaatcccagcactttgggaggccgaggcgggtgaatcacaaggtcaagagatggagaccatcctgggcaacatggtgaaaccccgtctctactaaaaatacaaaaattagctgagcatggtggcgcacgcctgtagtcccagctactcgggaggctgaggcaggagaactgcttgaacccaggaggcagagggtgcagtgagccaagatcccaccactgcactccagcctggtgacagagtgagactccgtctcaaaaaaaaaaaaaaaaaaaaaaatgacatgaatatacttcacacaactgaactgtacacttcaacacggttagatggtaattatcatcttgtaagtattttaccacaggttaacatgtttcacaacttgaaaaggaagtaattaattaccttcagctctctgagttctagaatttgtaacatttcaccccctgctccttcctgatctgcactggagcatctttcttctgtccctgctctactcagagttcactttcccttccctcacatcagcttcgttgaggctggtttgaacttaacgcaaaacattctcactaatgactgaattcccgccaagatttccatattatcacagtatgcttttaatcttctaagatattaaatatttgttctcatcatagctaaaatgcaatgcaaatcccatctcagatgtgggtcagatacctatgaatctcctgaggtagtcattgaaatgacttttttcttgagacggagtgtcactcaaccatgctgaagtgcagtggcgctaccttggctcacggcaacctccacctcccagattcaagcgattcttgtgcctcggcctcccaagtagctgggattacaggtgcctgctaccatgcctggctaatttttgtctttttagtagagatggggtttcactatgttggcccatctggtcttgaactcctgacctcaagtgatccacctgcctcagcctcccaaagtgctgggattacaggcatgagccaccacacctggcctgaaataatatctttcaaattctttgtagaatttgttttttcctgatttctgcacataggatgaaaaaaaaatcatgtactaggatttcgagagaagcaatgggtaatctaaaaagatgaaaagagaaaccacgtctatcccacagctactgctagatttcataggaaaggtagctggcccagtttggagctaggagaaatgtcaaacacatgaagaaatgagaagcaaagaaatgccatcacacatgaatgcttcatggcacccatgatgtccctgcttaggaggtaatggtatagatgactagatgacaaggacaaagatgagaggtgcaaagttgtccaagtccaatagctcaactgaactttcctaatggaattgttaaaaagtggtaaatttaaaaacttcccctggctcacgtggtggctcacgcttgtaatcccagcactttgggaggctgaggcgggtggatcatttgaggtcgggttttgagactagcctggccaacatggtaaaaccccgactctactaaaaatacacaaattagctgggcatggtggtgggcacctgtaatcccagctacttgagaggctgaggcaggggaatcacttgaagccaggaggtggaggttgcagtgagccgagatcacaccattatactccagcctgggcaacagagggagactcgtcttgggggtgagaaaagaaaaaaaaaaagcttcctccaatttataccgaaaattctctgttcaggactaagtggcatagagaatgttaaatgtgcctagatatcttcataactcatatattttctgttttctacatatcttgaaaggcagtgccaaatgacgtgtaattatctaggcggtaaaactgaaacatacttcctcttcccttgaatatcaaaaagcattgtggtattagtacttttatcttggatcattgttcagaaggaggttcagcccccagacaaccacatttttactgtcatgaatggcaagacaaaatgtagagctcaacttacccaaaggataaaaggctcaaaagacaaattatggcacaacttagcagccaaattcttaccaagtacagacttttgacatactgatctctctccagttgcaagtgggaacatgcactttgaatgatgtcattcaaaattaccctgcccagacacacttttcattgattctcttggagggcagttctaagagattctctggggctttctctgcatcatgagacgcagtgcagttctgcccttcaccttccggcagtttgtcacctcgtccctatgacctccgaggaactttgtctcaggccaactgtttgttccttgggctctttcatttcccctaaaaatcatttgctgcccctctaaatggcctacatctccatctatctccctctcccctcagaagagggtgctctttaagcatcaaccatccagcccttctagcagtctcatttttcagctggttcccatgtttatgtctgttctatgtttttcttttcctgttaagctgtctgttgtcagctcatttctgcagtgaatcttcagagaggagattggaagctttccttccacccatacgatagaactataaagcagaagagtttagaaagactttcccatttaagtgacgaaacctcatactccatttgtgacaaatagcacaaaggttaaaaaaacttatttttgaccaaaagctctgttgacattctattaaacaccgacctatttaattttcataatgtaaatggcagatattttcataattcttatgctaataaatcatttccctgattttttgggtaaaaccacatattcacaatgaagtccagaaacgtgaattgtttcatataatttactcttatttgtgattacaagtatacctctacagaaagttagtatactcacacaaaggtaacttgtgcagagggagatggcaaatttataacttctcagaaacacagtaatgataagtaaccaaggacttccaccaaagtcagtcccacgatgacgatggtcagccagagtattgataacctggaataataatagttgaaataatgaaaaggtcaatgacactgacaatatttcactcagaaagaatcatccttagaaaccgtcaacctcctccaaaaggtaaccacatccctcagatatcaccatgggattccactgctacaaaaaagaacagaagttagagaagtctcatgtttttcagatggctggtagtgtttttaggcattgcaaatgtggggtgttgtcattcttggtataaagcagggatatccaatcttttgacttccctgcctatattaaaagaagcaaagttgtcttgagccacacataacatacactaacaatagctgatgatctaaaaaaaaaaactttttttcttttttttttttgagacagagttccgctccactcagtcgcccaggctggagtgcagtggtgcaatcttggctcactgcaacctccagctcctgggctcaagccattctcctgcctcagcctcccgagcagctgagattaccggtctctgccaccatgcccgactaatttttgtatttttagtagagatgaggtttcaccatgttggccagtctggccttgaactcctgacaggagatctgcctgcctcggcctcccaaagtgctgggattacaggtgtgagccaccgtgcccggccattttttttgtttttgtttgttgtttgtttttgagatggggtctcactctgtcacccaggctggagtgcagtggtgtgctctcggctcactgcaacctctgcctctcaggttcaagtgattctcctgcctcagcctcctgagtagctgggagtacaggtgcctgacagtgcactcagcaaatttttgtattttttgtggagatggggttttgccatgttggccagggtggtctcgaactcctgacctcaggtaatctgcccgcctcagcctcccaaagtgctgggattacaggcatgagccactgtacctggccaaaatctcctaatgttttaagaaagtttacaaatttgtgttgaactgcattcaaaactgtcctgggccacatgcagcccgtcactcatgggtaagacaagctaagtataaagtaattatcttttcttttctttttgttttgagacaaagtcttgctctgtcgcccaggctagattgcagtggcatgatctcagctcactgcaacctccgcctcccgggttcaagcgattctcctgcctcagctactgagtaactgggattacaggcgcctgccaccacgctcggctaatttttgtctttttagtagaaacagggtttcaccatcttggccaggctggtctccaactcctgacctcatgatccacctgcctcggcctcccaaagtgctgggaatacaggtgtgagccactgcacttggccagtagttatcttttctttaattatttgttttttaaattgatgtataacattggatgcatttattacatatcacatggtaaaagaatccctctaaataatacttctctcttggattacatgaatctttgtcatttaaagctcagtataagtaaaaaaaaaaaaatacaatgaagagattacttcattcacaaataagtatcgaattttagtgcttaaaaattaacaaggtgggccgggcgtggtggcttacgcctgcaatcccagcactttgggaagccaaggtgggtggaccgtgagatcaggagattgagaccatcctagctaacacggtgaaacccatctctactaaaaatacaaaaaattagcagggcatggtggcacgcgcctatagttccagctacttgggaggctgaggcagaagaatcacttgaacccgtgaggcagaggttgcagtgagccgagatcgcaccactgcacttcagcctgggtgacagagtgagactctgtctgaaaaaaaaaaaaaaaattaccaaggtggagatcatgaaaatggcatgaatagtgtgggatttctctaagattgttgatattaattccattagactcttatgtgagtgaagacgaagacttcccctgagtaagttcagacagcttgtgataacatttctacatcaattcctcaggatttaactatatattcttgaaaacatctcaattttaagtgtttctttcaagatggtgaattaaacagagatagcccttcaacaggttgaactcagcatatgctgagtctgaaatggaaatgatggagttagagaaccatacaacaatggtaatgatttcagaaacatggtgttgagcagaacaaagcagacacaaaagagtacctatggcatggcatgcatctgtatacgcgaaattccagaataagcaagctaacctatgataagaaagagactggctgggaagagtgagagttcactttctggggtgacataatagtgtagatcttggctgggcacggtggttcacgcctgtaatcccaacactttgggaggccgaggcgggcggatcacctgaggtcgggagttcaaaaccagcctgaccaacatggagaaaccctatctctactaaaaatacaaaattagctgggagtggtggcacatgtctgtaatcccagccactcgggaggctgaggcaggagaatcgctcgaacctgggaagcagaggttgcggtgagctgatattgccccattgcactccagcctcagcaacaagggagaaactgtctcaaataaataaataaataaataaataaaataatgtagatcttgaacgggggttggtttatgctggtgtatgtactttccaaagttagtaaacttacacttgaggttatatattttggccaggcgcggtggctcacgcctgtaattccagcactgggaggccgaggcaggcggatcacgaggtcaagagatggagactatcctggcgaacatggtgaaacccagtgtctactaaaaatacaaaaattagccaggcgttgtaatctgagctactcaggaggctgaggcaggacaattgcttgaaccccggaagcggaggttgcagtgagccgagatcttgccactgcactccagcctgggcgacagagtgagactctgtctaaaaaacaaacaaacaaaaaaaagtcatcaaaccagatgacacaaatcaaatgacatttcactttgttttggtccgttttgtctgttggagacaagagtgcagcggggccatctcggctcactgcaacgtccagctcctgggcccaagcgatcctcccacctcagcctctccagtaactgggataacaggtacgcaccaccaggcccgactaatcttttttggaattttttgtagagatggggtttcgctatgatgccctggctagtcttcaactcctggactcaagtgatctgcccacctcggccccctaaagtgctgggattacaggcctgagctgtgtaatttcatgccgcgtgacacagcccagtaaaaaggaagaaaccccgcgggtccagcgtctactcacacaggtggactgatggctgataaatcccagcaggagccaaaagagcagccacagcacccatctactcacacaggtggactgatggctgataaatcccagcaggagccaaaagaggagccaaaagagtagccaccgcacccgcatgtcctggtcctttcagggctccctgaggcggccaggacagaggtggaggtggcttagggcaggggggagggaaggggacggggaccggggccggatctgagttggggagggggaggggagggggaggggaaggggaggggaaggggggaagtaagggaagggaaaggaggagaagggggctgttggggaggaggaggaggagaagaagaaaggggtctgggaaaggatccggttcaaattaagttctcaagcgctggtggaaggtttagctacaggtcacggagaagatcagggaagcaacaggacaggcagggcaagggagcgtgaggcttaggagcaattagagggagacaaaggttctgctttccaccaaaccttcttcggtctgggccctcccttagcaaccctggggctttagactctctctccaccaatccctgatgaccccggtggtgcctcacaatggacattccaagtagcgcccgcatcatcccaatgacccctcccccatctcagtcccccacgctcctcccaaggccaggtcctctctggaaccttcacaaacctgacttctggtcctccccaaccagctccctgtccctgcttctgggcgctccttccttcctgagctcccagggttcctcaaggtcacttttggcgacaaaacataaaaaacaaatgatggcaggatggcaggaagaacctcatacccaagcagagtgccaggttttacagcctccgctcagccattcatatcctaagcaacaaaacatcagcaggatgcggaaggtcccgatagtaaaccatctccatcacatccatgtagccatccgtccatcaacctgtatctcaggaacaaatgtacatacattcattttaagcatgcatggtacatttacaaaaattaacctgacttattttgttccagcaaatctcaatatatttgagagcaatcaaatcacacagcatgtttctgatcataaaactgtgctagaagtcaatgattaaaagctaattcaaaattattatttgcttggaaattcaaagtgcccttataagacataaacataagaaagaatccaaaatgaaacaagattgcctttcaactcaatgatgagatcataacatggcaataaaatgtctccctctggccggggaattcctctttgtggcacaacgttgtgtgatctcaaatcacccctaacccacctagacattttaacatccaaaaccgagtgatgatgtccttatctatatcatcttactgcccgtgtgtgtggactttaaattctgaacccaaatgagggggagaaaaccaagctgactttcatgactgagctctcagggacgtccaaggaatctgtgcatttcaagaaacaaagttcatcagcttctctcctaaggtatttgcccacaatagccagagggcttggccgcatcatgtgtgatgggtggggagctccaagcaggtgggcaggacccaggggcctggtgaccaggacagacccccactgtccatcacctttcctggccctgtcctcagctaaacttcccacaggccttctgcccgatcacacagagtgtgcccaaactcactcaggcctctggcagctgaaaaccactgctttaaatccctttaccatttactatgacataaggttattgtaaacaggaaatattctattgatgctacaaatggaaagccaatgcctttaccataaatagaaaaacaaccctaagaaacaagcaaaacaggggctgggggtggtggctcacgcctgtaatcccagcactttgggaggctgaggcgggcggatcacaaggtcaggagttccagaccagcctggccaatatggtgaaaccctgtctctaataaaatacaaaaattagctgggtgtggtggtgggcgcctgtagtcccacctacttggaaggctgaggcaggagaatagtttgaacccgggaggcagagtctgcagtgagccgagattgcaccactgcactccagcctaggtgacagagcgagactctgtctcaaaaacagcaacaactacaaacaaacaaaaaacagggttaacaaaagtatggaattcaattctttttatatgctgcagccatgttccagccctagatttggctgggcatggtggctcacgcctgtaatcccagcactttgggaggctgaggcaggcggatcacgaggttaggggttgacacgagcctggccaatatggtgaaaccccatctctgctaagaatacaaaaattagctgggcatggtggtgcacacctgtagtcccagctactcagaggctgaggcagaggaattgcttgaacccgggagacggaggttgcagtgagccaagattgtgccattgcactccagcctgggggacagagtgaaactctgtctcaaaaaaaaaaaaaaaaaatatatatatatatatatgtgtgtgtgtgtgtgtctgtctgtgtgtgtgtgtgtatctatataaatctcaaaaataaaagatcatttttgagattatcattttaaaagacaagataatgttcaacttaatgaataatttaattattactactggactttttgtagactgcacagagcattcaaaacaaatgaaggagaataaaaaatatgtattacatgttgtaaaataaatatgatgtggttaattcttttattcaaaattatagaacatatatatgtactgtagaatgtatttcttattatgagtcatgttaaaaagtagtttagaagctgttgatttgaatttccttttcaaattttgcaggataatttttttttttttttgacagagtctcgctctgtcgcccagtctggagtgcaatggcgtgatctcggcccactaaaacctccacctcctgaatctcagcaattctcctgtctcagcctcctgagtagctgggactacaggctgacaccaccatgcccggctaatttttgtatttttaatagggacgaggttttgccatattggtcaggctggtctcgaagtcctggcctctggtgatccaccagcctcagcctcccaaaatgctgggattacaggcatgagtcaccatgcccagcctaaacttggcaagataataaataaccttttaaagtgtcgttgggcacttgtctggttgtttttctttaggttaccatgccagcaatgattccttttgagtttctgacagaagatagtggttttcatccaaataagtcaactactctaccccatccctaagccacttgtatggaaagaaaaagaggaagaagccagtactgagactgcgtaagcttcccccagcatcacccgctatgagatgtgtggcagctgagacccgggaactgctcaagggcaccaggccccatctgtctgcactcactcaccttcctcaggtactcgcatgggcatgtcactgactttacgtgctgctgcagctccttggtgagctggccctggtcatgggacaggaaccgtggggtcaggacaatagagagcttcaccatttgcagaatgagaacaggggctcatgatgagtgccaacctattagacaattaaaaaaaaaagtgttgaatgagtggaaaaacaaggtgatgtttgagtctatagtggtcaagggcttcagaaaaggacagaaccaagttcaaattcctgtactttgaatttctacttcatgccatgcaaaattactttaccccttttaacctcagttttcttctgtgtgaaacaggaacaatagtttcattcgtcattcagtttctctcaaggtttcacgagatcatacctataaaacatccaagtcatttaaatgtatcatcatttcggtcataattagtgggatccatttcactattattggatatacagttctgtgcctgaaacctacaaagaaagaaaatgttaagtctaaaaagcattagtgatttctcatttttatattactaattataaccctatttaatcacacaaggccttgtccgcggcaggtgctcaataaacacttgtcgaatcaatgcatgtgggctccggagccacactgtttagattctattctgcctccaccacttatcagctgtgtgatctgggtaagataattcacctctttatgtctgcacttccctctccataaactatatataacgagaatccttagctcatttggttgtggtgaggggtgaatgatttggcacacaggaggggcttgttaacattagctgtgatgatctccttccaaatcttcattttcagagccacagatgaggccatagggcaaccaggtgaccttagagtgtaagtacacatgatcgccagctatgctctatctccaccataggtccaagactgggtagttctggcctggaggcttctgctgcatctgccttctcagtgttcacctaatgacttttgtattttcctcctcacatccccacagatggggttcaggctgccgaacacagctgggtgatgccagggcagtggccacctgtgccagccctgtgaggtagctggaggatcattgttccttccttctcgggctctgggcagatgccagggctggggtgacccatgacctcaagtttcttgctttggagggccacattttcccttggcaaagagggtaaaggtcacaggatgccggagagctgtgacttctctgtgccctgggcccaaactatgaagacctgacacactatgctaaaagtccaaggctggatgctccccagagcttcttgcctcaccgcttctgctgagggaggaatgaatactatgtcctcccagagctttgggagcttgtagcaagcagcctccccagcgcaaaatctcttggaaacctctaactgtgtcggaaacattagtgcaaatgttgcatcctatttcccatatgtccgcgtgttttaggaaaaaaccctcaatttcctaaatatgcaagaaaaattggtattgtaggacaatgtgactttttaaaaaatgttatttaaacatcttccccacctccttttctgccctccaagactgccaaatacttgttgaacaaatattattaaatgcctactacgtgccagccatgattcatggtcttggggacacagcagagaacgaactgacaggattcctcccttatgtaattcacattcttatatgataatgataagggttaacattaattaagctgtcactacgtgttagtcacggtgcagtcattcccacacattattacacttaaacctgctagcaagcttgcaaggtagttagttgtttttcctttaaaaactgagtctcagaatgatgaagcactttgtccaatgtcacacagctagtaagtgtggagaccttgcatccaatcaatgcccgtctcattctaaacaccacattatgtgttctccagcccatggagaataattttaacacagtcaatgaaatttctacacaacaatgttcttgtctcaagtccaagaatgcctcctacacctcccataatactggctttctggtgagtaaagatgccattctcatgtgtaatcaggtggcaaatggagatatgaccaaagtaaccatttgcctacactcgtaaccctgtacacactcttcctgtgtcgattcaattcaagtaccccttttgatcacttagcaaatctgacctttaaaagggttaaggtttttatatccatgtaagtttctgtattgctttggaagtctctggttaaatgaataccctttttaatagtgacctgtgattctgttttgatcaagtgtttacaaacttgacatctttgatgggtttctccagtgtcaaaatcctaaatcaggtctttttggcttaaaattaactttgggatttttcagctgcatcccttcgggagtctaaagaatgcatctctcatcttgtagaggtattaagtgattcgatttatttggtagattatatgggcgggcattgtcaaatgtggtgatactgcatgggagggcactgtcaagtgaggtgacattagatctcatctcagttatatttatgggtatgttgttgatatacgtgttccaaaaattacatacatttatacaaatttaatatgttatgatttgtaattttgattgttatgctaaatatttgctaaagtttagctttagcaatattatgctaaatatatgctaaatatttgctaaagttatatttgcataaacatgttatgaatggctgggcaccatcactcatgcctataatcccagcactttgggagaccaaggcaggtggatcacctgaggtcaggagttcaagaccagcctgaccaatagggtgaaaattacacgaaaatactgtctccatgaaaaatacaaaaattagccaggcttggtagcacaggcctgtcatctcagcaactcgggaggctgagataggagaattgcttgaacccaggaggcggaggttgcagtgagccgagattgcaccactgcactccagcctgggcgacagagctggaatctatctaaaaaaaaaaaaaaaagttattaattatttctgaagatgatatgaaatttataaaacactggtggtcctgatgtaatgctgtcagtcatgattctgatcactgtcttaaaatgctgcacataagataagtaattggctgggcacagtggctcacacctgtaatcccagcactctgggaggccgaggcgggtggatcacgaggtcaggaaatcgagaccatcctggctaacacggtgaaacctcgtctctactaaaaacacacaaaaaaaaaattagccgggcatggtggcgggtacctgtagtcccagctacttgggaggctgagaggctgaggcaggagaatggcatgaccctaggaggtggagcatgcagtgagcggagatcacgtcactgcactccagcctgggtgacacagtgagactccgtctcaaaaaaaaaaaaaaaaaaagtaattaaatttccttgtgaactgggaagtttcatcagacttttatcataactattgttttcatcatccacagttagttttgaattcttctctaaaaatatttgtaattggcagtagtccaaattttcttttgttttctttcctgtttttgagacacagtctggctctgtcgcctaagctggagtacagtggtgccatcttggctctctgcaacctctgcctcctgggttcaagcgattctcctgcctcagcctcccaagtagctgggactacagtcgcccgccaccacgcccagctaactggtggtggtacagacggggttttaccatattggcccggctggtcttcaactcctgacctcgtgatccgcccgcctcagcctcccaaagcgctgggattacagccgtggagccaccgcgcccggcccccaaatttgctttgcatggagaaaactctaacaaatcctcttgaacatggttttctgataacccagatcaatgaactacccaggcttcaccactataggcatgtgagaaactcgcacttataccccctcaatacattaaaactaaatatttttttaaaaatcaatgggccaggcgcagtggctcacgcctgtaatctcagcactttgggaggccaaggcaggcggatcacttgcggttaggagttccagaccagcctggccagcccatcttactaaaaatacaaaaattagccaggcatggtggtgcatgtctgtaatcccagctactcgggaggctgaggcatgagaatcgcttgaacctgggaggcagaggttgcagtgaaccaaaattgtgccactgcactccagcctgggcgacagactgagactctgtctcagaaataaaaaaaataaaaaccaatgaactaaaaaccaatttctagtggcttctaataaggaaacaatggttcaaaaaactgctaagcaagatcaagcaaaacaaaaaaatctattaagataatgtttttataattcgtatttaaaacattgttgtttgttgattcttgattcattctttttttttttttttgagacggagtctcactctgtcacccaggctggagtgcagtggcgggatttctgctcagtgcaacctccgcctcctgagttcaagccattctcctgcctcagccccccgagtagctgggattaccggcgcccgccaccacgcccagctagtttttgtatttgtagtggagaccgggtttcaccatgttggccaggctggtctccaactgctgatttcaggtgatcacccccccgcctgggcctcccaaagtgctgggattgcaggcgtgagccgccgcgccgggcccttgttttgttttctagattgaagaaaattttttctcagaagttatctagaatttacaccgatttggtaaagcacacttttgtgaacaaaggtgggtggaagcgtttgtttttccttcctacttgatccttccaaagtttggaaactattcataaatattcttactttgatgtacacatgttctccttataagcaggctgtaatcagaatgattggttatattatcaaggctttgactgaaacatcctatttaagaatacgcagaaaatgcctggcttcgagtttgcagccttacgttccagtcagggggaaactgtcactccctgcaggcctgagaacctgagagcttttccgggagcaacttggcagggagggtcccggcagctgctccgtgggcaggaaccatggggcgcagccccgggcgaccctcgggccggcggggaccttccgcttcctggcgtctttctccatcgccccgccggctgctggggaagcggcgggtgcccagtgcctggaggtcgctctctccccacctctggctgcgggaacggagaggccgcggcggccggagcagggtgggcggcctgaggcgagagcccagccggcctccgcggggaatatggcgacctgcggcgagctgagcgtcaactgctgcgccgccgacttctcggagcagcgaaggcgactcgagagaagacgccgccaagtggaacccgggccccgcggccctgggatggggcagcagccactgcagccaggaagccctgggcggggcgctgggcgccaacgagcgtcacggcaacctccatgcggcgccctcaccagcctacaggcggcaccgcagcagcctccaggcagcgcccacaccagcctacaggggtcgccgctcgcactgcacctgcctccgccgccccggggtgtgaactgcgctgtctgtcggcctggctacgctgacccgggcagcccaggcccgcagcagccggacgaggagcccagggccactgcccggggttacgagaaggagcaggacggtgccccagaaaaatgcaagagctcagagctagggcccccgtgccaggaaaggctaggagcagaagatggagagatggagatggagaagcggcaggtgggaaggagcggcgctccaccggtggggtcagcatgcgctggcggggcttagagtatgaagaggaagaagctgggcagaaagagcggaaacgagaaggtgcaatgacacaacagagcacaatgcagaatccagccctaggactccaataaaggctgggtttaattgcaactcacacaccccacccctaatcagagaggatcaggggagagagaggacccaaggaacactggaacctgaagggcgggaatctgaggccaagactgattgttggaaattgtgggcatcaggaaaggagaaagtgagtcagaatgggtggaccgagggtggtgttggggcggggggggcagtgaactgggttaggaaggattagaaatcagaaccttaggaaggatccagaaaggaactgtccttaaaaaggtgcatgctgcggctgggtactgtggctcacgcctgtaatcccagcactttgggaggctgaggcgggcagatcacgaggtcaggagatggagatcatcctggctaacacagtgaaaccccgtctgtactaaaaatacaaaaaattagccaggcgcggtggcaggtgcctgtagtcccagctacttgggaggctgaggcaggagaatggcgtgaacccgggaggtggagcttgcagtgagctgagatcacaccactgcgctccagcctgggtgacagagcgagactccatctccgaaaaaacaaaaacaaaaattagccgggcatggtggcacatgcctgcagtcccagctactcgcgaggctgaggcaagagaatcgcttgaaccagggggaaggaggttgcagtgagccgagactgcgctactgcacttcagcctgggagacagagtgagactcctcagaaaaactgctttcttccaacttacaaaagccggaagaagaaaatgtcatttattttcatggtaggagatttatgccaagattgtacaccaggtggagacctgtaccagctccctctgctcccatctcccagagttctaggaatttactcttgcacactggctctttcatgtctcttcgactttgcctacggaggtctctctgcctagcatgccttctctccatgtctcaccattatcctccggctttatttatttatttatttatttatttatttatttttattgtttgagaaagtgtctgactttaccttccaggctggagtgcagtggcgtggtcactgttgactgcagcctcaaattcctgggctcaagaaatcctcccgtctcagcctcccaagtaggtatgcatcgccacacccaactagttttttaatttgtgtgtgtgtgtttggtagagatggtagagatgttgcccaggctggtctcaaactcctgggccccactgatcctcccacctaagcctcccaaagtgcagagattacaggtatgagccaccacacacacccagcctctccatctgttttatttatttatttatttatttatttttgagacagagtctccccctatgccccacactggtgtgcagtggcgcaatcttgggttcaccgcaacatttgactcccgggttcaagtgattctcctgcctcagcttccagggtagctgggattacaggcgtgcaccatcatgcccagctaatttttctgtttttagtagagacggggttttgccatgttggccaggctggtctcaaactcctgacctcaagggatgcacctgcctcagcctcccaaagtgctgagattacaggcctgagccaccatgccctgctactgcacccagctactcaaggcacatatggagccaacatacttgaccatctgcaggggtccacccagggtaggggagctatgagcactggcgtcggagggagcccagcttattggcccaaccccgagatagacccatttcccagtgggcatagcactccaaggcttgtcactcacagcctctgcaactccaagtcttggtatgcctgaaacccatactccacatgagcacaccttcactgagcacctagtgtgggacagataggccagggctgagcacacaagaggaaggagacgcagactttgccttgaggagatcacgttcaggcagggacagaattactccagagtgtcgcaggcaaagggaccaaagcctcggattttcttttcttttttttttttttaatttttttgagatggagtttcactcttgtttcccaggctggagtgcaatggcatgatctcggctcactgaaacctctgcctcctgggttcaagcgattctcctgcctcagcctcctgtgtagctgggattacaggcacccaccaccacacccagctaattttttgcatttttactagagacagggtttcaccatactggccaggctggtctcaaattcctgacctcaggtgatccacctacctaggcctcctaaagtgctgggatctcaggtgtgagccaccgtgcccagccgtctccaatagaaggaggcagagagaggtttggcacccaacagaaatgagtttaaatcttggttcccctggttcttggctcaagcttctctggtgcccagtgccttcctatgaaagggaatgagaggggtctggggttgtgacaaaatcatgtttctagtgctgggcaaggtgatatgcacctgtaatatcagcaactcaggagcctgaggagggaggattgcttgaggtcagaaattcaagcccaggccgggtgtagtggcacacaactgtaatcctagcactttgggaggccgaggtgggcagatcacctaaggtcaggagtttgagaccagcctggccaacgtggtgaaatcgcagctctactaaacatacaaaaagtagctgggcatagtggcgggcagctgtagtcccagctactcccaacctgggaggcagaggttgcagtgagccaagatcgtgccactgcactgcagcctgggcgacaagagcaaaactccatctcaaaaaataaaaaaataataataaataaaataaatgaataaataaataaaataaaaataaaaataaattcaagcttagcctgggcaacaggctcaaccccatctcaaaaaaaaaaaaaaaaaaaaaaaaaggccaggcatggtggctcacacctgtaatctcagcactttgggaggccaaggcaggtggatcacctgaggtcaggagttcaagacgagcctggccaacatgttaaaatcctatctctactaaaaatacaaaaactagctgggcgtggtagcacatgcctatagtcctagctacttgggaggctgaggcaggagaatcactggaacctggaggcagaggttgcaatgagctgagatcacaccactgcactccaggctggacatcagagtgagactctatctccaaaaaaaaaaaaaaaaaaagtagtcaggaagagacatcaacaaaaattggtgatgaatggggtagcagtggcactggggaccaaaagggaacagatattttgcactacaattgtcatctcgtttcttttcttttttttttgagatggagtctccctctgttgccaggctggaatacagtggtgcgaactcggctcactgcaacctccgcctcccgggttcaagcaattctcctgcctcagcctcccgaatagctgagactacaggcacatgccaccatgcccagctaatttttttatttttagtagagacagggtttcaccattttgattaggattgttttgatctcttgaccttctgatctgtccacttcgtcctcccaaagtgctgggattacaggtgtgagccatcacgcctggccaattgtcatctcttttcacttttgagcacatatgggtatgctgtaaaggaaattttaaaatctcaggatcccagccccccatcttcttatgcaaaagagaaagtcattgtgacacccttttccaaatgaatagctgttcctaagatcatgtaacagccagatagatgtccattcagcaagaaaaggcctcaggcatctgggaagggctgcgccccgtagatcattcataaataaattatttgctggcctcctataatcaagtacatgccaatgttaactttaggtctacaatcttttttttttctttgagatggagtctccctctgtcaccgaggctggagtgtacttgtgcagtctgggctcactgcaacctctgcctctcaggctcaagcaattctcttgcctcagccacccgagtagctgggattatgggcgtgtgcctccgcactgggctaatttttgtatttttagtacagatggggttttgtcatgttggccaggctgttttcaaactcctgacctcaggtgatccacccgccttggcctcccgaagtgctggaattacaggtgtgagccactgcacccagctgagtaaatttcttgattgcacagaatgtatggtgatattggtggacttaaggacattgaattgtttatcaggaataaagtattatgtgtgttttctggggtcctggataatgctgtagcattcagggtagattgagtaaaaaaaatgtagagatggtttcctagttacttgtttttgcttctaattttcattcatttgctatttattctcttctggctttgcttgtgtatgcatatatatataaccattattattattattatttttagtttctagtggaaggcttttatttggttctgtgaatagtcattttgtttcctatgtatttctagcaagttgtattcattccattgatctagaattcctaggctgccttcgttgggcctgcaggaattaatggagcatagcagctttttattttttatatttattttttgagacagagtctcacactgtcgcccaggctggagtgcaatggtacgatatcagctcactgcaacctccacctcagaggttcaagtgattctcctgcctcagcctctggaatagctgtgactacaggcacccactaccacacctggctaactttttgtatttttagtggagatggggtttcatcatgttggccaagctggtctcaaactcctgacctcaggtgatccatctgcctcggcctcccaaagtgctgggagtacaggcttgagccacaccgtccagcgagtatactttcataaatagaatttgagtcatatttctgtctctgcctaatttctccaaaatttgtaaactatttgtgaatattcttaattcatgacaatgtgtttgttggcatacagtccaacagggtcaccagggccgatcagggagagagagcctagaaacttgacatgttggcactactgtaactgctcaaggggttcaccttgcccactgcctagacagagccgattcatgaagacaggggaattgtaattgaccaacatggtataatcctgtctctactaaaaaaatacaaaattagctgggaatggtggtgggcatctctaatcccagctacttgggagcctgaggcaggagaaccggttgaactcgggaggcggagattgcagtgagccatgatcgtgccattgcacttcagcctgggtgacagaaagaaagaaagaaagaaagaaggaagggaggaagggaggaaggaagggaagaaagagagagagaaagaaagaaagctgctaacccaagcagaacaaaaaattaattgaataccaaaaaaacactttgctaaattttcatgttaaaacagccgataccaaaattgtttagataaacagtttggtttttgttgttgttgtttgtttttgttttttgctttttgcttttttgagacggagtctcaatctgtcacccaggctggagtgcaatggcgtgattttggctcactgcaacctctgcctcccaggttcaagtgattcttgtacctcagccttctgagtagctgggattacaggtgcccaccactatgcctggctaatttttttgaatttttagtagagacggggtttcaccatgttggtcaggctggtcttgaactcccaacctcaggtgatccacccgccttggcatcccaaagtgctgggattacaggcatgagccaccaccccttttttgttgtttttgaaacagggtctcactctgtcgcccaggctggagtgcagtggagcaatctcccctcactgaaacctccttctcctgggttcaagggattctcccatctcctcccaagtagctgggattacaggcttctgccaccatgcccagctaattttttgtgggctcgcccagcctaggtatacaatttgaatgaactccaaggtctaagtcaaattacctatgataacccattaggtatcagtgctatgcacgtaaactggagaaacaactgatattcagagcacgcaagtccgatgttaaccatggactcatggagaatcaagatggtcaccttgtccttcctgactccttaaagtgtttgttattaaaggttctgcagttgggcgtggtagctcacacctgtaatcccagcactttgggaggccgaggtgggcaaatcacctgaggtcgggagttcaatatcagcctcaccaacatggagaaaccccatctctactaaaaatacaaaaaattatccgggcgtggtggctcatgcctgtaatcccagctactcaggaggctgaggcagaagagtcgcttgaacccaggaggcggaggttgcggtgagccgagatagcgccattgcactccaacctgggcaacaagaatgaaactctgtctaaaaatgaaaaataaaagactctgcattccatgactcatcatggaaaagataaaatgatctaaattaaatatgtattggtgtgctgaattataaattgctaaaatagttcataaccaatgtttcgtttgtcaaattcatgttcctgggaagacaatcaaagcttcaggtgcatttggctacctcatgggccatttgaacatttcagttgtcaattatcattttcaatgcatgttttctggttgctttcccatgcaagagggctgatattacaacagtagatcattatggtacagtgtattttcaccaggtactgaaagctttttatggctcactgactggggacaatcaattccttcacaatctagaaccaaagattggatcttctgagaacatcagagaaagaatgtccttgccatccacaatacagcaaaacttcaggaccttgaactttgggttcataatctcacaagagggaagtttttcgccagaaaaagatggcatccttgatgtgaacagcttttcccaagatcacagatcaagacttctagtttttttttttgagacagagtcatttttttttttttttgagacatagtctcggtcttgttgctcaggttggagtggaatagcgcgatcttggctcactgcaacctccgcctcctgggttcaagtaattctcctgactcagcctccagagtagctgggattacaggcgcccaccaccatgcccggctaatttttttgtatttttagtggagacagggtttcaccatgttggccaggctggtctcgaactcctgacctcaggtgatccgcctacctcggcctcccaaagcgctgggattacaggcatcagtcaccgtgcccggccttgtgatagtgtcttactctggcacccaggctggagtgcagtggtgcaatcttggttcactgcaaccttcgcctcccagattcaagcgattcttgtacatcagcctcccgagccgctgagactacaggcacgtgccaccatgcctggttaattttgtgtgtgtgtgtgtgtgtatgtttgtgtgtgatggagttttgctcttgttgcccaggctggagtgcagtggtgcgatcttcgctcactgcaacgtctgcctcccgggttcaagcgattctcctgcctcgggctcctgagtagttgggattataggcgctcaacaccatacccggggaattttttgtatttttagtagagacggggtttcatcatgttggccaggttggtctccaactcctgacctcaggtgatccacccgcctcggtgtcccaaagtgctgggattacaggcgtgagccctgtgcccagcctcagtgtctctctctctctcgactagagagactgaccagggacaatcaactctctccagactgacagagagagagacagagagagcgagaaagagacagagtctggctctcacccaggctggagtgcagtggtgtgatcttggctcactgcaacctctgccttccgtgttcaagcgattcctgtgcctcagcctcccaagtagctgggattataggtccacaccaccacgcccggctaatttttgtgtttttagtagagacagcctcaccatgttggccaggctggttttgaactcctgacctcaggtgatccgccagcctcggccttccaaagtgctgggattacaggcgtgagtcaccgcgcccggccaaataaaataaaatgttaaagcaaattcaggactacccctcctccaagtcttctgttccctttgggcgcccaggtgagcgggggaggggctgggggagtaataacatcaaaagagcgccttttcctcccttattccgaggagacttccctgggcctgactcccggtcctgtccccagcgccccgcggcctctggagccccttcagtgaccaagatacagagatcaggacgcctttgcgccgccccaggtgcccgcccctagctggctctgcttgggccgcgagggaaggtgaggtcgggggcggagccggggcgtgacagccggggtgtgtgtccgccgggcttggtgcctccggtggccctgcagcaccgtcccacctctgccaccctccgatggggccgctacctgtgtgcctgccaatcatgctgctcctgctactgccgtcgctgctgctgctgctgcttctacctggccccgggtccggcgagggtgagtgaggaaggggctttcccggaactcaggcgttccggtattcctccagcccttcctagggacccagcagccctgcctcccatccctctccaagttcctagttgccctagagcccccagctcgctcttctaatgctcacccacacgatgcgccccagccttctgcagggccccccactcactcctcccagggacccagaactagcccagtccttccccaggggcgcagagtcctctcctggctccctcccctaaccggctgtgaccctctccggcagcccggaagcctcccggttgtcctgatctggggtccgcgaacttacccttcattccacctgtccctgagatgtgagacaccagagggtgggaggagcaggggcagaaagggccggcttgggggtgggagaagaatatattgtgcccctgtacaacaaaccccggtgaccaaaaacaaaacaaaacaaaacaaacaaacaaaaaaacaaaaaatagaacatactgtccctatctcactatccatcctttggggtcactgtagagaggtcccgtgggtgactgcccatttctggggtgcacagatacatgtacccgcagagtactatgcagacaccgccagcacacagatgcgcaggcacaggaccagccccagactcacctggccctcaggtgtgcggctcccacagggaaaaatactgacataccgctagggggacacacgcacacacagctcaaggatacccgagacagcactcaggacaattcagatgcaccgtgtacacacacacacacacacacacacacacacacacacacacacacacacacagagcagcacagacacacatatgtgcgcatagaccctggggtcacaggatggacagacagccctggccctcccccgaggaggctgcagcgggcagacagggcaaacagaccccagcgtgacctgccacacctatgttggcacagagggagtgttttgcttggttataagcacagtgctcatgcctgccccacgcctagaaccctccctctataaggctgttgctagggctctgagataccagagagtggtcagggacggtggcaggggaacctttggggacagcttcagggtacggtgttgggactgggacattgtcagggtgctcagacagggcgtgttccctgggtcttggtgcatttagaggtcaagggaccatttctggaagctcactgtgtgccagggcagcttatatcagagctcagctcttttttttttttttttttgagacagagtctcactgttgcccaggctggagtgcagtggtacgagctcggctcactgcaacctccacctcccgggttcaagcgattctcctgcctcagcctcccaagtagctgggattacaggcgtgcaccaccatgcccagctaattatgtatttttcgtagaaacagctttctccatgttggtcaggctggtctggaactgctcacttcaggtgatctgcccgcctcggactcccaaagtgctgggattacaggcgtgagccaccgcgcccggccccaaatgcgttttacattttcttcctctttgattcatctttgtcctccaacataaatatgctactttttccactgataaaaagacaaaatggaatttcaatctggcctggacttctcaaaaaagtcagtgtgatgaaaactgttctagataaaacagaaatgagactgggcatggtggctcatgcctggaatcccagcgccttcggaggccaaggcaggagaatcacttgaggccaggagtttgtgaacagcctgggcaacatagtgagaccccatatctactaaaaatttaaaaattagctgggcatggtggtgcatgcccgtatgtctggagactgaggcaggaggattgcttgagcccaggatttggaggctgcagtgaactgattgtgccactgcactccagtgtgggtgacaaagtgagacactgtctctaaaaaaaaaaaaaagagagacaagatgatcaggatgagcgcagtggctcatgcctataatcccagcactttgggaggccaaaccaggtggatcatatgaggtcaggagttcgagaccagcctggccaagatggtgaaacccctttctactaaaaatacaaaaattagctgggtgtggtgtcgcacgcctgtgatcccagctactcgggaggctaaggcaggagaattgcttgaacctgggaggcagaggttgctgtgagcaagattaaaccactgtgctccagcctgggcaacaagaatgagactgtgtctcaaaaaaaaaaaaaaaagatgatcaaacacaatgcgtcaacctcccagagctgtataaaccctaaccctaacccaggaagcaggcaagcctgtgtgtgagtttccactctattgctggtactactcggctctggcaaccccgaaggccaccttcccctgttgtcactgtgtaaggaggaaggagcactggtttgcaagtcagaagcctgggttgaagcctctgctcgggttcctgctggctgtgggaatgtggggttacctttcccggctggcctcgtttcctacatgtccaatgcaggggttccagtcacatgcattgggcaccattacatgtccaagctgtgccaggatctagaaaaatggctgggctcaggccaaggggccttcctgtctggcagtgaaaataagaggagataccaagggccctgagtctgagtctggaggggaagtcatgagcacagggcagtgccagggcccgggagctgccacagaggagcccaccttggtgacagacacctgtaggcgcgtccgtgatgcccagttcccaacacagggaactggacaaacgtttcatgcacgactcttttttcccttcttggctaccttgaggaccttgattataatagttagccttttttttttctttttttgagactcttgctctgtcacccaggttggaatgcagtggcaaaatcttggctcactgcaaccttcatctctcaggttcaagtgactctccttcctcagcctccctagtagctgggattacaggcatgaaccactatgctcggctaatttttgtatttttactacagatggggtttcaccatgttggccaggctgatcttgaactgctgacctcaggtgatctgcccgcctgggcctcccaaaatgttgggattacaggtgtgagccactgagcccagccggattataatagccttttcatgcaccaggggctttatactcattatctcatttcattcatatgagttgaagtcagtttatcccccatttcacagatgaggaaaccaaggcccagagaggttaagaatttgtccaaggtcacacagccaggaagtaggattcaaacccagacagccaggctgtaatacctaggctcttctcaggctcatgcccttcccaggggtctgggaagccctgacctgcagcctgtcacctttgtttaccccccagcctccaggatattacgtgtgcaccggcgtgggatcctggaactggcaggaactgtgggttgtgttggtccccgaacccccatcgcctatatgaaatatggttgcttttgtggcttgggaggccatggccagccccgcgatgccattgactggtgagtgcatgcctgggaccaggccacaaaatccctcacactctggggtagtcaaggcttatgaggaagtacccaaaactgaagctggggtttggtccagggagatcccagtgtgcagtactactttgcaggcaggcagagggctcttggataacatggccagtgaagccagatcttggtaccagctgccccttaccctggccttgagctgatgacgttgccttaaaaacttggctaggagctgtggctcactcctgtaatcccagcactttggaaggccgaggtgggcagatcacttgaggtcaggagttcaagaccagcctggccaatatggtgaaaccccatctgtactaaaaatgcaaaaattagctgtgtgtggtggcaggcgtctgtaatcccagctactcaggagaccgaggcaggagaattgcttcaacccaggaggtggagtttgcagtgagttgagattgcaccactgcattccaacctgggtgacagtgcgagaccctgtctcaaaagaaaaaaataataaaaatataaagtgaccaggtgtggtgattcacacctgtaatcccaccactttgggtcgaagcagtaatatcactggagaccaggagtttgaaaccagcctaggcaacatagtgagaccctgtctctatattaaacacacacacacacacacacacacacacacacacacacacacacacacacaaaggaagccagactatgcactaggaactgccctgggaatccctttgcgttctcacaacaatcccatttcacagatgaagaaaccaaggcacagaaatattcagtaacgtgtccaggtgcggtggctcacgcctgtaatcccagtattttgggaggccaaggcaggtggatcacgaggtcaggagttccagaccagcctggccaacacggcgaaaccctgtctctactaaaactacaaaattagccaggcatggtggcgcatgcctgtaatcccagctactcgggaggctgaggcaggagaatcacctgaacccaggaggtggaggttgcagtgagccaagatcgtgccattgcactccagcctgagtgggattacaggcatgagccactgagcctggcctggtgagctaatttttaaatttgttatagagacaagagagacaagagttttcttatgttgcccaggctggtctcgaccccctgatctcaagtgatcctcccaccttagcctcccaaagtgctgggattacagatgggtgtcaccgcacctggcctctaaggagggtttcattataaacctaccctgaagggagggaatccgattttatgagagggtgtagcctggtgaggcctggatgacctccagaggcaggggcttgtgcctgggctgaggcctaagggtcaatgggcagacatgaagttgccccaggcagagggtacagtgtgggcaaagtcaggaagtggcagggcttggatcactccaggaagagagaggagtcatgtgtcacaggagctcgagacccagagagggaggcaggcaggcaggcagggaccaagctt

SEQ ID NO: 33 - DNA, 820 bp, homo sapien
cccggcatcatcacgaggcgcttcacccaacagatccacttctgtgtccagtcaggctgcgcaggcggcctccccacaggtccctgccaccaccacacccaagattctccatcctttaacacgcaattatggtaaaccatggttgacaaacagcaaaatgtcaactccttgtaaagcagcagagtgctcagactttcccgtgccatctgcagagggaacgccaatacaaggaagcaagcttcgacttccaggatatttatcagggaaaggcttccactctggggaggacagtggcttgataacaactgcagctgccagagtccgaacacagtttgctgattccaagaaagaattcccagccgaccaggaagtcgagctggaagcaaagctggcagcagggccagcagccgccgaggcagtgatgcatcagactttgacatttcagaaatccagtccgtgtgctcagatgtggaaactgtcccccagacacacagacctacaccccgagcaggttctcggcatccacagcgaagccttcaaaaatccccacgccccagaggaaatcacctgccagcaaattggacaagtcctcaaagagatagtgcaattggttctaccaaggccttccttgagcatttattatttaaagtttgaacgatggtaaatatggtgtagaaaattcttgtgaaatattgcaagaggcgagtttaaaaattctgagatggcttattgtgtatagccttattatctgtataatattgcaaatatctggggtaaagtcccttatttgtgagggagaacgttaacatgacttacattt

SEQ ID NO: 34 - DNA, 626 bp, homo sapien
tcatcttcttccttcttactgcttttccaaacattctccagtaagcaggtactacatttataatggaaggaattttttaaaaaattttaagctgtacactttcaagtaagatctgaattctaatgctggcttgtgcctcttactatgtggtttggtcattatagattatggccagtttcagtttccccatctttgaaaaggagataatatgttatctcttgggagtagttctgaatatgaagtgtgttgatacaagaagcactgacaatgtttctgtgtcttaaatttaaaactgggctggtttggcttttttatcaagagagcttaacagataaaaaatgaaattagtctattttctacttggcagcagagtatctgtcttattttaggatgcagtgtgaaacttaccattcaactgaacaactagttgtcaactaatgaaaataacaccttttctctaagcatctttaaaaacacaaccagggggggcccggctaccaattcggcctatagtgagtcgtattacaattcactgggcgtcgttttacaacgtcgtgactgggacctggcggtatcccaattaattcgcttgcagcacataccccctttgccaactgcggttgcgt

SEQ ID NO: 35 - DNA, 2074 bp, homo sapien
atggagtctcctaacagcctctcggtgctgatgtgaaatttgaccatctgattccagtttttttcttttccttttcttttttgcatttccttccctcgccatccgtcgtgtagtgaattgttcagtcttgctccgtttcaagagaggagatcatgattgagtgaagccaccccgtccgcagccaggaaaagcacaaagaagaaactgcaacaatggccaagctgacagaatccatgactaacgtcctggagggcgactccatggatcaggacgtcgaaagcccagtggccattcaccagccaaagttgcctaagcaggccagggatgacctgccaagacacatcagccgagatcggaccaaaaggaaaatccagaggtacgtgaggaaagacggaaagtgcaatgttcatcacggcaacgtgagggagacctatcgctacctgaccgatatcttcaccacattagtggacctgaagtggagattcaacctattgatttttgtcatggtttacacagtgacctggctcttttttggaatgatctggtggttgatcgcatacatacggggagacatggaccacatagaggacccctcctggactccttgtgttaccaacctcaacgggttcgtctctgcttttttattctcaatagagacagaaaccaccattggttatggctaccgggtcatcacagataaatgcccggagggaattattcttctcttaatccaatctgtgttggggtccattgtcaatgcattcatggtgggatgcatgtttgtaaaaatctctcaacccaagaagagggcagagaccctggtcttttccacccatgcagtgatctccatgcgggatgggaaactgtgcctgatgttccgggtaggggaccttaggaattcccacattgtggaggcttccatcagagccaagttgatcaaatccaaacagacctcggagggggagttcatcccgttgaaccagacggatatcaacgtagggtattacacgggggatgaccgtctgtttctggtgtcaccgctgatcattagccatgaaattaaccaacagagtcctttctgggagatctccaaagcccagctgcccaaagaggaactggaaattgtggtcatcctagaaggaatggtggaagccacagggatgacatgccaagctcgaagctcctacatcaccagtgagatcctgtggggttaccggttcacacctgtcctgaccctggaggatgggttctacgaagttgactacaacagcttccatgagacctatgagaccagcaccccatcccttagtgccaaagagctggccgagttagccagcagggcagagctgcccctgagttggtctgtatccagcaaactcaaccaacatgcagaactggagactgaagaggaagaaaagaacctcgaagagcaaacagaaagaaatggtgatgtggcaaacctggagaatgaatccaaagtttagtgccctagctgggcaaacccttctcttctccccccaacacaatctttccttgtctctcattctctttctttttctgtctctcttgctttgttctttatttgtttatatttaatttttacatgaccagaaaacaaatcttcaaggtgtaaaatatctacctgccctctctcagttattcagattgacaaggtagacatggatttgatgaaagtgcaaagtgccctcatttgtggcccaagcctggtctcctcccaaaatactacacatccaactcctggagatttcagttacttacctgcatgtgttgtacaataccagatcactcaaaaaggtgtgtcaaagattttacctgggatatgacaagcaaggtttctggtgcctatttattcattcagtgagacacagagtggagccctcagttttatggatcccaattcatttcatctactacagggtgaggtgcttgcccccatgtgggtgtggcagttacagggcccaggtgagctgaagacaaaccactgtacatatatatgccttatgtaattattttctttttgtaattagtaataaaacccagcatgtacaaaagt

SEQ ID NO: 36 - DNA, 1194 bp, homo sapien
ggccggagggagcccgcgctcggggcggcggctggaggcagcgcaccgagttcccgcgaggatccatgacctgacggggccccggagccgcgctgcctctcgggtgtcctgggtcggtggggagcccagtgctcgcaggccggcgggcgggccggagggctgcagtctccctcgcggtgagaggaaggcggaggagcgggaaccgcggcggcgctcgcgcggcgcctgcggggggaagggcagttccgggccgggccgcgcctcagcagggcggcggctcccagcgcagtctcagggcccgggtggcggcggcgactggagaaatcaagttgtgcggtcggtgatgcccgagtgagcggggggcctgggcctctgcccttaggaggcaactcccacgcaggccgcaaagggctctcgcggccgagaggcttcgtttcggtttcgcggcggcggcggcgttgttggctgaggggacccgggacacctgaatgcccccggccccggctcctccgacgcgatggggaaggtgctatccaaaatcttcgggaacaaggaaatgcggatcctcatgttgggcctggacgcggccggcaagacaacaatcctgtacaagttgaagctgggccagtcggtgaccaccattcccactgtgggtttcaacgtggagacggtgacttacaaaaatgtcaagttcaacgtatgggatgtgggcggccaggacaagatccggccgctctggcggcattactacactgggacccaaggtctcatcttcgtagtggactgcgccgaccgcgaccgcatcgatgaggctcgccaggagctgcaccgcattatcaatgaccgggagatgagggacgccataatcctcatcttcgccaacaagcaggacctgcccgatgccatgaaaccccacgagatccaggagaaactgggcctgacccggattcgggacaggaactggtatgtgcagccctcctgtgccacctcaggggacggactctatgaggggctcacatggttaacctctaactacaaatcttaatgagcattctccacccatcccctggaaggagagaaatcaaaaacccattcataggattatcgccaccatcacctctttcaattgccactttctcttcttttgaatttgaactctggagttactgttctacagtttggcggggacggggc

SEQ ID NO: 37 - DNA, 2530 bp, homo sapien
  misc_feature (722)..(722): n is a, c, g, or t
  misc_feature (2090)..(2090): n is a, c, g, or t
ccaggcgctgcgcggctgctctggcgtccagtcctacccgcaacccgccgcgacgttactgctcctctgctgccttcgtttctggtcctcggccgtcctcgccgcccgcccagaggagtccccgcgcccgccaagaagccgctttccgctggcccgcagccgccgcgacttcggcacagtttctccctctggctagtctcccaaacggccgctcctcgcccgcgggaagaccaggctgcgaccgcgaacgcccgatcctctccaggagccgcagcgagcgcccggcggccacgccccgcgacacaccccggcggctctcggcccagcgcgcctgccttcgccgccgccgtcgctcctcgcccgctgcacgacgacgcgacgcccctgctgcaggcggcggacccgaccggacccagacccagacgcaagatggcgacggccgcgtgactgcctcagcgtccccgagctcggctccgagtgcacctacggactgactgtgggggcagagaagggcgagatcaggactctgtctttgttaatcgtgactgcatgaaggtcgcctccctcgggcctacttggtgggagtgtctggtattgttctaaggccaggagcacggtgagccacagtctgttggtagaatttggcgtcttgatagttgagaaaatggcgatgacactgttggaagactggtgccgggggatggatgtgaactcccagaganctctgttagtctggggcatcccagtgaactgtgatgaggctgaaatcgaagagaccctccaggctgcgatgccccaggtctcctaccgaatgcttgggagaatgttctggagggaagaaaatgcgaaagcagccttattagagctcactggcgctgtagattacgccgcgatccccagggagatgccgggcaaaggaggggtctggaaagtgttatttaagcccccaacttctgatgctgaatttttagaaagattgcacctcttcctagctagagaggggtggaccgtgcaagatgttgcccgtgtccttgggtttcagaaccctactccgaccccgggcccagagatgccagcagagatgctaaactatattttggataatgttattcagcctcttgttgagtccatatggtacaagaggctgacacttttctcggggagggacatcccagggcctggagaggaaacctttgatccctggctggagcacactaatgaggtcctagaggagtggcaggtgtccgatgtagaaaagaggcggcggttgatggagagtcttagaggccccgccgctgatgttattcgcatccttaagtccaacaaccccgcgataaccactgccgaatgcctgaaggcgcttgagcaggtgtttgggagcgttgagagctctagggatgcccagatcaaatttctgaacacttatcagaacccgggagaaaaattgtctgcttatgtcattcgtctggagcctctgctacagaaggtggtagagaagggggccattgataaagataatgtgaaccaggcccgcctagagcaggtcattgccggggccaaccacagcggggccatccgaaggcagctgtggcttaccggggctggggaagggccagccccaaacctctttcagttgctggtgcagatccgtgaggaggaagccaaggaggaggaggaggaggctgaggccacccttctgcagttaggcctggaagggcacttctgagtgccaggaaaggcagctttagtgcagacctagatcacagctacttttcttgtccctgtggggtcttacagatgtgtctctgagtagtaaaggcttagccttgttctgttttgttgttttttggaggggaaggttagtcaggcctgagtattcatgtaacattctaaaattgtgccagcgagcaccgtgaacgactgcaatgcaagcgggtcttgctggctaaaatgcccaggtaaagggttggttggacacagcgcttagtgcacgctgtcatcatggacatcataatcagttgtgaaaaacacgcgaacctatgacacttcttattccacactgaatgtgaaattgcatgttcagatgtttnactacgaggcctggctcacaggaagtgttcagtaaaagtatgcactgttagattactgataacgcggatagatttttgtttaccataaattgttccagatttatattaatggaaggaagtgtgcatttattagctattactcaactttacaatgcaaacatcttatttctcatctttaaacatgtcgaccagtttaattgaaaagtattctgagactgcaaaatggggtgttaaaaaatactgcagttacggagctgtgtaaaccagtttctcattgcataagatacagatgtaaattgcatggagaggttgatatgcacctgtacagtaattcactcccccatttcacttctttgtcagagaatagttcttgttcatactgagtgttctaaatttgaagttatatatacaaattaaaatattttaaaaaaaaaaaaaag

SEQ ID NO: 38 - DNA, 4050 bp, homo sapien
gtgccccccgcgctccgctccggcagctccacgctcgcgcccgccatgccggagcagttcagcgtcgccgagttcctggccgtcaccgcggaggacctcagctccccggctggggccgccgccttcgccgccaagatgccccggtaccgaggggcggcgctggcgcgggaggagatcttggaaggagaccaagccatcctgcagagaataaagaaggctgtgcgggcaatccatagctccggccttggccatgtggagaatgaagagcagtaccgagaggccgtggaatccttaggcaacagccacctgtcccagaacagccatgagctgtccacaggcttcctaaacttggccgtgttcacccgcgaggttgctgcgctcttcaagaacctgattcagaacttgaacaacattgtctctttccccctggacagtctgatgaaggggcagctgagggacggtcgacaggattccaaaaaacagctggagaaggcatggaaggactatgaagccaaaatggccaagctggagaaggagcgcgatcgggccagggtgacaggagggatccctggggaggtggcccaggacatgcagagagagcggcgcatcttccagctgcacatgtgtgagtatctgctcaaagccggggagagccagatgaagcaaggtcctgacttccttcagagcctcatcaagttcttccacgcccagcacaactttttccaagatggctggaaggctgcccagagcctgttccccttcatcgagaagctggcggcctcagtacatgcactccatcaggcccaggaggacgagctacagaagctgacccagctccgggactccctccgagggacactgcagcttgagagcagagaggaacacctgagccggaagaactcaggatgtggctatagcatccaccagcaccaaggcaacaagcagtttgggacggagaaagtgggctttctatacaagaaaagtgacggaattcgaagagtctggcagaaaaggaagtgtggagtcaagtatggctgcctgaccatctcacacagcacgataaaccggcccccggtgaagctgaccctgctgacgtgccaagtgaggccaaaccctgaggagaaaaagtgcttcgacctggtgacccacaaccggacgtaccactttcaggcagaggacgagcacgagtgtgaggcgtgggtgtcagtgttgcagaacagcaaggacgaagccctgagcagcgccttcctcggggagcccagcgctggcccggggtcctgggggtccgccggccatgatggggagccgcacgacctcacaaagctgctcatcgcggaggtgaagagcaggcctgggaatagccagtgctgcgactgcggggctgcagaccccacgtggctcagcaccaacctgggcgtgctcacctgcatccagtgctcgggcgtccaccgcgaactgggcgtgcgcttttcgcgcatgcagtcactcaccttggacctgctgggcccctccgagttgttgctggccttgaacatgggaaacacgagcttcaatgaggtcatggaggcccagctaccctcacacggcggccctaaaccctcagctgagagtgacatgggcacccgcagggactacattatggccaagtatgtggagcataggtttgcacgccggtgcacacctgagcctcagcgactctggacagccatttgcaacagggacctcctgtcggtactggaggcctttgccaatgggcaggactttggacagccgctgccagggcctgatgcacaggcacctgaagaactcgtcttgcatttggctgtcaaagtcgccaaccaggcttccctgcctctggtggatttcatcatccagaacggtggtcacctggatgccaaggctgctgacgggaacacggctctgcactacgcagcactctacaaccagcccgactgcctcaagctgctgctgaaggggagagctttggttggcacagtaaatgaagcaggcgagacagctctggacatagccaggaagaagcaccacaaggagtgtgaggagctgctggagcaggcccaggcggggacctttgccttccctctacatgtggactactcctgggtaatttccacagagcctggctctgacagtgaggaggatgaggaagagaagcgctgcttgctgaagctcccggcccaggctcactgggccagtgggaggctggacatcagcaacaagacctatgagactgtcgccagcctgggagcagccacccctcagggcgagagtgaggactgtcccccgcccttgccagtcaaaaactcttctcggactttggtccaagggtgtgcaagacatgccagtggagatcgttctgaagtctccagcctgagttcagaggcccctgagacccctgagagcctgggcagtccagcctcctcctccagtctgatgagccccttggaacctggggatcccagccaagccccacccaactctgaagagggcctccgagagcccccaggcacctccagacccagcctgacatccgggaccaccccttcggagatgtacctccccgtcagattcagctccgagagcactcgctcctatcggcggggggcgcggagccctgaagatggtccctcagccaggcagcctctgcccagaaggaacgtgccggttggcatcactgaaggagatggctcaaggactgggagtctcccagcaagttctgtgcaacttttgcaagactagctccttgctggcccccacatgccccatgctaggccccaatgttcagagctgggacttgagctcacaaaactggggagctgagacatttgttctcttggatctcactctctctgtcccttgtgcctctgtagctggccttcttcctgccacaggccatgcctctaccaaggacacatggcctttccctgttagggctgatggcggttctttcctatctcattacccgctaggggcctgggagccctgtggctggatctgagtgctcctgagctggcttcagctgcagaactctcagtccctcatcagatcgagactctatttcccccgtcagtctgggggcttcacaagggcaggagagccctccatcactgacttccagatcagggaccctgccaagtagggactgtcttctcagccagccatttattagtctaatattccttcactaaattccaactctatgtctggacctgtgttaggcacttcagataccacacgagtaagacaagggccctgcaggggtggtcctttggtggaaagctggtcttaagggttgggcttgggaataggcagggtcagattccagggcatggctctggactcagctggtttatacctatatgaccattacagttgtctacagatcacatccattctggctggtcaacatgcatgctgtactggctgttaaataaaaatattctgaatgtcactccttttgagggacagcacagccttccctaggcattctcctatattccccagccaaattgtagagtcagatgcacccacatttgcctgtgtccttgatttagcaggaaggaaaggaatagtcggggttgatggatgcccacttctcttctctttctcttggtcaactcaggagccttttagtctgagggaatggagaggcaaagaaagaagggagagtaatagaattgggagggcagagacttaagggttctgcttcccagccctagaaattctatcattgctcagccccaatgagaaagcagatacacctaagccatcatcaaccactaacatctcaacttgccagttgctgggtgctgggccctggcaggaatgggccaagccaagcaggggagactagagagcaccaatggccaacacagctgcctggctggggaggctgtgctgtttcccctggagacctgactggtctgtggttcccacaggaacagggttgtcttttgagcccccagtgtctggtttcattcatctcagacttgttatttcactcatctctaataaaggattggggggtcagtt

SEQ ID NO: 39 - DNA, 5420 bp, homo sapien
ctgtgctggtgtcttagagcaagagcctccctgagctttcggagtggaagaacagtggaagagactgcagcctaaagacttttaaaattaacttggcatcacttttatcagctcaaaggctaaacaaacaaacaaaagcagtgtcatttattctaagaaataacttcttaaaggttaaagctgaaaaatattcaagttatttttggataacaacttacagaggccaaatgacataggatgaaggctgttcgtaacctgctgatttatatattttccacctatctcctggttatgtttggatttaatgctgcccaagacttctggtgttcaactttggtgaagggagtcatttatggatcgtattctgtaagtgaaatgtttcctaaaaactttacaaactgcacttggacgctggaaaatccagatccaaccaaatatagcatttacctgaaattttccaaaaaggaccttagctgctctaacttttcactcctggcttatcagtttgatcatttttcccatgaaaaaataaaggatcttttaagaaagaatcattctataatgcaactctgcaattccaagaatgctttcgtttttctacagtatgataaaaattttattcaaatacgtcgagtatttccaactaatttcccaggattacagaaaaaaggggaagaagatcagaaatctttttttgagtttttggtattgaacaaggtcagcccaagccagtttggttgccatgtattatgtacttggttggagagctgcttaaaatcagaaaatgggagaacagaatcatgtgggatcatgtatacaaaatgcacctgccctcagcatttgggagagtgggggatcgacgaccagtcgctgattttgttaaataacgtggtgttacccctgaatgagcagacagagggctgcctgacccaggagctgcaaaccacccaagtctgcaatcttaccagggaggccaagcgaccacccaaagaagaatttggaatgatgggagatcatacaattaaaagtcagcgacctcgatctgttcatgaaaaaagggtccctcaggaacaagctgatgctgctaaatttatggcacaaactggtgaatctggtgtggaagagtggtcccagtggagcacatgttcggttacttgtggtcaagggtcgcaggtgcgaaccagaacttgtgtatcaccttacgggacacactgcagcggcccattaagagaatcaagggtttgcaataacactgccctctgtccagtacacggagtatgggaggaatggtcaccatggagtttatgttcatttacatgtggtcgaggccaaagaacaagaacaaggtcatgcacacctcctcagtatggaggaaggccgtgtgaaggacctgaaacacatcataagccttgtaatattgctctttgcccagttgatggacagtggcaagagtggagttcgtggagccagtgctcagtaacgtgctcgaatgggactcagcagagaagccggcagtgcactgcagctgcccatggaggctccgaatgcagagggccatgggcagaaagcagagagtgctataaccctgaatgtacagccaatggtcaatggaatcagtggggtcattggagtggttgttccaagtcctgtgatggcggctgggaaaggcgaataaggacctgtcagggtgcagtgataacagggcagcaatgtgaaggaacgggcgaagaagtgagaagatgcagtgagcagcgatgccctgcaccttatgaaatatgccctgaggattatctgatgtcgatggtgtggaaaagaactccagcaggcgacttggcattcaatcaatgtcccctgaatgccacaggcaccactagcagacgctgctctctcagtcttcatggagtggccttctgggaacagccgagctttgcaagatgcatatcaaatgagtacagacacttgcagcattcaattaaagagcaccttgctaaggggcagcgaatgctggcaggtgatggaatgtcccaggtgaccaagacactgttggatttaactcagagaaaaaatttctatgcaggcgatcttctgatgtctgtggagatcctgagaaatgtgacagacacatttaaaagggcaagttacatccctgcatctgatggtgtccagaacttctttcaaatagttagcaaccttctagatgaagaaaacaaggaaaaatgggaagatgcacaacagatttatccagggtcaatagagttaatgcaggtgattgaagattttatacacattgttggaatggggatgatggactttcagaattcatacttaatgactggaaatgtagtggctagtattcagaagcttcctgcagcctctgttctaacagacatcaactttccaatgaaaggacggaagggaatggttgactgggcaagaaactcagaagatagggtagtaattccaaaaagcattttcactccggtgtcatcaaaagaattagatgaatcatctgtatttgttcttggcgcagtcctatacaaaaacttagatctaattttgcccactttgagaaattatactgtcattaattccaaaatcatcgtggtcacaataaggcctgaacccaaaacaaccgattcgtttctggagatagaactagctcatttggctaatggtactttgaatccctattgtgtattgtgggatgactccaaaacgaacgagtctttgggaacgtggtccacccagggatgtaaaactgtgcttaccgatgcatcccatacgaaatgcttatgtgatcgtctctctaccttcgccattttggctcagcaacctagagaaataatcatggaatcctctggcacaccttcagttaccctaatagtaggcagtggtctttcttgcttggccttgattaccctagcagttgtctatgcagcattatggaggtacatacgctctgagagatccataatactaattaacttctgcctgtctatcatctcatccaatatcctcatactggttggacagactcagacacataataagagtatctgcacaaccaccactgcatttttgcactttttcttcctggcttcattctgttgggttttgactgaggcgtggcaatcatatatggctgtaactggaaaaattaggacacggcttataagaaaacgctttttgtgccttggatggggtttaccagcattagtagtggccacatcagtaggcttcaccagaacaaaaggatatggcactgatcactactgctggctctctcttgaaggaggactactctatgcttttgtgggacctgcagccgctgttgtcctggtcaacatggtgattggcattttggtatttaataaacttgtttccagagatggaatcctagataaaaagctcaaacacagagccggtcagatgagtgagcctcatagcggtttgacgctcaaatgtgccaagtgtggagtagtttcaacaacagctttgtcagccaccaccgccagtaacgccatggcgtctctttggagctcctgtgtggtgttgccccttctggctttgacgtggatgtctgcggttctggccatgacagataaacgctccatattgtttcaaatactttttgctgtgtttgattcattgcaaggctttgttatagtcatggtccactgcattcttcggagagaggttcaggatgcatttagatgccgattgagaaactgtcaggatcccatcaatgcagattcttcgagttcgtttcctaatgggcatgctcaaatcatgacagactttgaaaaggatgtagacattgcctgtcgatcagttcttcataaggatattggtccttgccgagcagccacaataacaggaacactttctaggatttctctaaatgatgatgaagaagaaaagggaacaaaccctgaagggctaagctattcaacattgcctggaaatgtcatttccaaagtcatcatccagcaacccacaggtttgcacatgcccatgagtatgaatgagcttagcaatccatgtttgaaaaaagaaaatagtgaattgcggagaactgtgtacttatgtacggatgataatttgagaggggctgacatggacatagtccatcctcaagaaagaatgatggaaagtgactatattgtgatgcccagaagttctgtaaataaccagccttcaatgaaagaagaaagcaaaatgaatattggcatggaaaccttgccacatgaaaggctattgcactacaaagtaaaccctgaattcaatatgaatccccctgtaatggaccagttcaatatgaacttagagcaacatctcgcaccccaggaacatatgcagaatttgccctttgaacctcgcacagctgtgaagaatttcatggcctctgagttggatgataatgcaggactatcaagaagtgaaactggatcaacgatatcaatgagttctttagagagaagaaaatcacgatattcagaccttgactttgagaaggtcatgcatacaaggaagaggcatatggaactatttcaagaactaaatcagaaatttcaaactttggacagatttcgggatataccaaatacaagcagtatggaaaaccccgcaccaaacaagaatccatgggacactttcaaaaaccccagtgaatacccgcattacaccacaatcaatgtcttagacacagaggcaaaggatgctttggaactgaggccagcagagtgggagaagtgtctgaatttgcctctggatgtgcaagagggtgactttcaaacagaagtttaaaaaaatcaaaatggactaaggtagagacaaaactttattgcactgacacttaagacttgggaagcctgacatttctatctggacagtgtgactatcttatgtcaggaccttcatgtgccaaacgtcagtggtgttttcatatggtaacttctcactagtcaggctagtggagagatgaccaggtgtacagttctgaccatcctgtgttgtaagtacccgtggaatggatttgtaaggtaatctttatagataaacctcaagcaacgattcatgttgtaaccgcttcatatggtttagttttcaaaaaacttcaccatgaagcacaatgtatatatttatgcagtttttaaagtttataacagtctgtttggccattactacactttttactttataatataaaagcaaagtttttgtcattaaatgaatgtttgttgagctacattcttcattgctttaaatgcaataaagtaataatctcacttttatatgaataatatatttcacatctttattattgcagttttctctagaaagctctgagaagctttctctgctgcagctgtgtataaaatatttaaaatgttgtatggtgtaaataaacttttgtctac

SEQ ID NO: 40 - DNA, 709 bp, homo sapien
agaccaacacagcctggaccaccacagccaccccagcagaggccttatggatatgaccagatcatgcccaagaagccagcagaggaaggaaatgattcggaggaagtgccagaagcatctggcccacaaaatgatgggaaagagctgtgccccccgggaaaaccaactacctctgagaagattcacgagagatctggacccaaaaggggggaacatgcctggacccacagactgcgtgagagaaaacagctggtgatttatgaagagatcagcgaccctgaggaagatgacgagtaactccctcaggatacgacacatgcccatgatgagaagcagaacgtggtgacctttcacgaacatgggcatggctgcggacccctcgtcatcaggtgcatagcaagtgaaagcaagtgttcacaacagtgaaaagttgagcgtcatttttcttagtgtgccaagagttcgatgttagcgtttacgttgtattttcttacactgtgtcattctgttagatactaacattttcattgatgagcaagacatacttaatgcatattttggtttgtgtatccatgcacctaccttagaaaacaagtattgtcggttacctctgcatggaacagcattaccctcctctctccccagatgtgactactgagggcagttctgagtgtttaatttcagatttttcctctgcatttacacacac

SEQ ID NO: 41 - DNA, 1441 bp, homo sapien
ttttagattctaaagtttcacagtagaaaggatgtcggggtctcaattccaagccctgtctaggaaggaagcccccctgcagcctcctgatggcttgatggtatctggcacctgactgtacatacccccactcctactccagataggtgacacacttccaacactgtgaattgctcagcccaaagggcatctgacttcacactgagctgagcctatcctgtgtccctggacttgcccgttggtgccagctctgctttgaggatccacagagcctacctgccctcagacctgccacagcccttcaaagggcaagaggcacaaccatgaccctcaggctagctcttgattccaggccagagacccagtcctttcaattatgctttaatgctttacagaccacagtgtgggaacccgccctcatccctgccaccttctctccaatttttctgtaactcgggagcatgcagtggcaggcctgtgccgaaggacccatccccatctcatctcatgcttgttgcctgccgctatgatataatccctgggcctttggagtttcttccatatcctggtccttggcatctgggctgggggggtccatggacagtgctggacatttcctgattcctggaactcagtcccaggattagggttttctgttccccttggcggtaatcccacgctgattcccataagcagggccagttcttggtcttcttaaaggcagtgctggcctagcagaggccttgctggttgcatctgttctttctggccagagaccttggtgggtaacagctggtgcagcctcacagcccatgtgctcagggcctcagagccatgtgtggtgccagtggccagcaccccatgagatgcaaacatcaggggatccagctaatgcctcattcccccttggggcctggcctagactgggtatgtggggtgtgtgtgtgtgtgtgtgtgtgtgtgtgtgtgtgtgtgtgtgtatttgttcatctatctatccatccatccatccatccatccatccatccagggattcattcattctacatgccaaatgtgggccaggctcaagggacccagagaggagagccctctgggagtccccagtctggtagaggaagcaggagtagacacaatgagagcacattagaaacaggcacaatcacagatggaagccaggtgctgtgggtgccccaaggaggaattgcctcgggtggattagggaagacttcccagctaaggcttggagcacaggtaggagttcatttggtgctaatagtagaagtcgtggccaggtgcagtggctcacgcctgtaatcccagcttgtgctttgggaggccaaggcaggtggatcatttgaggtcaggagttcaagaccagcatggcttacatgctaaaacccagtctctactaaaaatacaaaaaaaaaaaaaaaaaaaa

SEQ ID NO: 42 - DNA, 2988 bp, homo sapien
aaggggcggggccgaagcggcccagggggcgggcgtttgaaatcagtgccttagagtagaccctaaacctcattttataccttcaagaaccaattacttaatgtctcttccgtcttttccgtccccgaccccctcccagactccttcattccggtactgcgtggacggaaagccccgggtagccgacaccacgtccccggctagcgggagagagcgtggaaaaggattacaccaaactgtttaaatccaacgactcctgcttccatcctttctcctgagctagaaccaacaaacctagagagttgggcttcggaaaaactagtgttttcatttaattggatatgaagaaagaacaaatatgtacggggcaaccacgatctttacaaagaacataagttccaggaaagcaggaaccttgtctctcttgttcactgggtgtatcctctgcatatagaacagtgcctggcacataataggtgctgaattttgttctaaacactgaggacattctctgctacatttgggtcgtacccccaggtctgagtaattcaatagacttaagaagacagagcccagcagcaaccgaaacataacagagttgcaggatcagctaacgtcaatgcctgggcaaagctgctgcccagagtggaatctcactagtgaataaacaagcccaagaaagattatcatctcatttgcaaaaaaaaaagtacgctggtagatcctgctacctcatagataacaccagtcaaatttttttttaaagtagcattttcctacattgtcaactatctagaacatacctaaaaactaagagtttactgcttattaaatggaaactatgaagtctaaggccaactgtgcccagaatccaaattgtaacataatgatatttcatccaaccaaagaagagtttaatgattttgataaatatattgcttacatggaatcccaaggtgcacacagagctggcttggctaagataattccacccaaagaatggaaagccagagagacctatgataatatcagtgaaatcttaatagccactcccctccagcaggtggcctctgggcgggcaggggtgtttactcaataccataaaaaaaagaaagccatgactgtgggggagtatcgccatttggcaaacagtaaaaaatatcagactccaccacaccagaatttcgaagatttggagcgaaaatactggaagaaccgcatctataattcaccgatttatggtgctgacatcagtggctccttgtttgatgaaaacactaaacaatggaatcttgggcacctgggaacaattcaggacctgctggaaaaggaatgtggggttgtcatagaaggcgtcaatacaccctacttgtactttggcatgtggaaaaccacgtttgcttggcatacagaggacatggacctttacagcatcaactacctgcaccttggggagcccaaaacttggtatgtggtgcccccagaacatggccagcgcctggaacgcctggccagggagctcttcccaggcagttcccggggttgtggggccttcctgcggcacaaggtggccctcatctcgcctacagttctcaaggaaaatgggattcccttcaatcgcataactcaggaggctggagagttcatggtgacctttccctatggctaccatgctggcttcaaccatggtttcaactgcgcagaggccatcaattttgccactccgcgatggattgattatggcaaaatggcctcccagtgtagctgtggggaggcaagggtgaccttttccatggatgccttcgtgcgcatcctgcaacctgaacgctatgacctgtggaaacgtgggcaagaccgggcagttgtggaccacatggagcccagggtaccagccagccaagagctgagcacccagaaggaagtccagttacccaggagagcagcgctgggcctgagacaactcccttcccactgggcccggcattccccttggcctatggctgcccgcagtgggacacggtgccacacccttgtgtgctcttcactcccacgccgatctgcagttagtggcactgctacgcagccccgggctgctgctgtccacagctctaagaagcccagctcaactccatcatccacccctggtccatctgcacagattatccacccgtcaaatggcagacgtggtcgtggtcgccctcctcagaaactgagagctcaggagctgaccctccagactccagccaagaggcccctcttggcgggcacaacatgcacagcttcgggcccagaacctgagcccctacctgaggatggggctttgatggacaagcctgtaccactgagcccagggctccagcatcctgtcaaggcttctgggtgcagctgggcccctgtgccctaagtccacgggctgtctttatatcccactgccctgctgtgtgacagtttgatgaaactggttacatttacatcccaaaactttggttgagtttgcaggactctaggcatgcatgaaagagcccccctggtgatgcccttggatgctgccaagtccatggtagttttcaattttgccatacttttgttcttcctaccggaccctggaatgtctttggatattgctaaaatctatttctgcagctgaggttttatccactggacacatttgtgtgtgagaactaggtcttgttgaggttagcgtaacctggtatatgcaactaccatcctctgggccaactgtggaagctgctgcacttgtgaagaatcctgagctttgattcctcttcagtctacgcatttctctcttcccctccctcaccccctttttcttataaaactaggttctttatacagataaggtcagtagagttccagaataaaagatatgacttttctgagttatttatgtacttaaaatatgttgtcacagtatttgttcccaaatatattaaaggtaaccaaaatgttaaaaaaaaaaaaaaaaaa

SEQ ID NO: 43 - DNA, 1658 bp, homo sapien
  misc_feature (1321)..(1321): n is a, c, g, or t
  misc_feature (1525)..(1525): n is a, c, g, or t
  misc_feature (1547)..(1547): n is a, c, g, or t
  misc_feature (1617)..(1617): n is a, c, g, or t
  misc_feature (1624)..(1624): n is a, c, g, or t
  misc_feature (1629)..(1630): n is a, c, g, or t
  misc_feature (1635)..(1635): n is a, c, g, or t
  misc_feature (1652)..(1652): n is a, c, g, or t
ggcgtcatacacctgcacccgggagaaaggcgaggctctgcatctagatttacctcgttctcttttgtctccgcttttttttcacatttccttgcgaccctggcccttgagcgacaaaaaggggaagccaaggctggcccgagagaacggagagggcacatggcccctagccacaagtgagagggcttctgctccagcctagccgaagggatgcgctctggagtccggcccatctaggatccttctgccacggtctttcttgtgcccaactataggtggagactggacctcagaagagggagtgggtgcccccgagaactcacagctagcggacagtggaaagggcaggagccggaccaaggtgaggacagtggaactgaaggccgctggttacctctcctgccctccgctggccacagtggagaagacagcccctccctcctgctctgacctgacagtgttcatccatcgccctgtattagcgaagaacaacatcaagctggctagcaaggaactgtatacagggtccagctgggtatcacactggatctcacccaaagcttagatgtgatccagctcagtatcacaaagcagaacgaaaaggatgtgtttgggctgagaggccatacattggctccggcatgaacgtgtgattttctatctgagttgctggctatatggcagcacaaaattatattgaaattgaacacagctcctgcagcatgggcagctcctgtgacagcaggcgcccgcagcctgcaaagcgtctccagtgccgccgcctcagtgaacctcaaccagcggcacctagcagctttctctgccaccctcttcaggtagttctgtagcagcgcgtttctcatgagacacttccctgtgagcagctttttctacccttgaggatggatttccagcaaattctgcccatgtggtaccacagccacttctctgccattcagtgaaactgccgttgtgccctcttcaaggtctggatctaagcccagggaccaggaaacctcttgcttgagtgctggaactcaggccagaaggtatggctgctgctatgtgctgtgaccagagaatcagagttctctttacttcttaccagccaacctcttgaaaatgcctttttgttttttgtttttttttgagacggagtctcgctctgttgcccaggcagtgcagtggctcactgcaacctccgcctcctgagttcaagtgattctcctgcctcagcctcacaagtaggtgggattacaggcatgtgccaccacgcccagctaattttgtatttttagtagtgaccggggtttctccatgnttggtcaggttggtctcaaactctcgacctcaggtgatccacctgtctcagcctcccaaagtgctgggatttacagacgttagccagagcgcccagtctaagccctttatagcttaattctatatattaaattttcccagttcaaattaaaaaactgtgtgctttgttctcstrattgggaccttggttggatataaaaattgntacaaaggagtgtgtctcaaangagataggatgtacaaaggaagrggatattggggacgggatttggggtattttgggttagtaaataagtnttaaatngaaanngaatnttagggttaaaaaaaanaaaatt

SEQ ID NO: 44 - DNA, 542 bp, homo sapien
ttttttttttttcatacttaggaaaaatgaaactttattactacaaacatgagagctgcatacattctaaatcaaatggttgcaacttataataccaagaattaaatgtgaatcctacttaagaatatgctgagctggccaggtgtggtggctcacgcctgtaatcctagcactttcaggctgaggcagatggatcgcctgaggtcaggagtttgagaccagtgtggccaacgtggtgaaaccccatctctactaaaaatacaaaaattagctgggtatggtggtacacgcctgtaatcccagctacttgggaggctgaggcaggagcattgcttgaacccgggaggcggaggttgcagtgagccgaaatcgcgccaccgcactacagcctgggtgacaagggcgaaactctgtctcatctaaaaaaagaatatgctgatccggtcattttgattaaactctcaactgtgatataactgttctctattccatttcaaaaatgaggctgggcaccatggttcatgcctgtaatcccagcactt

SEQ ID NO: 45 - DNA, 2001 bp, homo sapien
ggcaaaggccgcagggaacacaaaggcaagaagaagaccccatcatccccatctctgggcagcttgcagcagcgtgacggggccaaggctgaggttggagaccaggtccttgtcgcgggccagaagcaggggatcgtgcgcttctacgggaagacagactttgccccaggttactggtatggcattgagctggaccagcccacaggcaagcatgatggctctgtcttcggtgtccggtacttcacttgccccccgaggcatggggtcttcgcaccagcatcccgtattcagaggattggcggatccactgattcccccggggacagcgttggagccaaaaaagtgcatcaagtgacaatgacgcagcccaaacgcaccttcaccacagtccggaccccaaaggacattgcatcagagaactccatttccaggttgctgttctgctgctggttcccctggatgctgagggcggagatgcagtcttagaggccctggacacctgacaaagagacagagtccccactagcatctcctgacacccgaggagccctgagtcaccctgagatagagattcccagtaacacatccagagtagagacccctgttagccagccctcgatcattgaggccccattattaacagatactcccataataacccccaaatacagaccccatgtcacccagaaagagattccctgagtagcaccttcaggctagtccctatccccaacccctcagagcagattcccagattaacagatttccatatcaccccaaatgatggtgaccctctccacataatgcattacaacagaacattcttgaatcacccaaccctggatcagaaacctccccattaacaaacactgccccttaagtcctcttgaaataaacataggtcacacccccaaagcaaaagagtaacagacattcatgtcattgttccccatttaacatcagtcctctcaagatgtcgtgaccccatggtcaccctgaagcccttagattccaacccctcaatcagagacttccttcattaacaaagacccttgttcttatccctcaagaagaaacccaccataaccagcccactgtcacccctaatttacagacaccaaaacagtcctggaagtgctaattacaggaccccccaagtcttcctaccctctgcaccctcaagaaacccccagtgccttgtatgaagcccaccccacatggcccacagctcctgtgctggccagactcccagaaaattctctattttttaagtaacgacttccccctttgggggaccccaaaatttggaggccccattctaggactctggggatcccaaaccctagagtacacacgtcccaaactcccctgtgccctcaagtcctacagcccctagaagaccccaatgccgtaactcctaggacccccaaatcatggaatcccaaatccccagggaatcccaaatttgaaaatccaatcccaagtccccaggaaacccaatcatgaggtccttgtgcctggtatggaggagactgcagtcaggatatgcattccaggctcccagacacctcaagccctattcacaggcaccaggaaaccccacacaggaattcccatccctggaaactggagaatttcaatgccccgagtccatgggtttcaagacaccaaattccaagagccccagccctaagggaaccccaaatcctaaagcctccatctctaataaatggaaggccccaaggccctgaggggatctcaaatcctggaaccccgatttcaatctacgttctagtcactggcctcaaaggaccccacagcacctgggccagaccaacagctcgagggagaacctgaaggcccagggggtccagggcggacctggggccccgaccaccaaggacagctcacgactgccccttcactgcatgtccccaaactcagcatgactcctgtcctcttcaataaagacgtttctatggccaaaaaaaaaaaaaaaaa

SEQ ID NO: 46 - DNA, 3839 bp, homo sapien
ccccgccccctgcgctcacctgcccgcgcgctcgccttccggggacccggggcccatggacacatacacccagccctgctgtcccgcgcgccagctcaccagccctacccaagggacatcattcacgcctgggcgcctccgccgggctccgggagcccaaggtcgcggctgggccagcgctgagcgtcagaggacgagagcaggggcctccccggtcgccccagcaggcccaggcacataggtgcccagagatccctggcttctgatcgcccggaagactaagagtcccatgaagtgggcaccattgctattgccagttcacagatgcagaaactgaggtaaaaactagctttagttttggtccagaaagcattttcaaggagctggtcaagcatggctttagcagataagagacttgagaacttacagatctacaaagttcttcaatgtgtgcggaacaaagacaagaagcagatagagaagctgaccaagcttggataccctgaactaatcaattatacagaacccattaatggacttagtgctttgcacttagcctcagtttccaatgatattgatatggtcagctttctccttgaccttggtgctcaccctgatgtgcaagaccgaatgggctgtactcccacaatgagggctgcagaactgggccatgaattgtcaatggaaatattagcaaaggcaaaggctgatatgactatagttgataatgaaggaaaaggtgttttgttttactgcattttaccgactaagcggcattatcgctgtgctctgatcgcccttgaacatggtgcagatgtcaacaattctacctatgaaggaaagccaatattccttagagcttgtgaagatgcacatgatgttaaagatgtgtgcctgacatttttggaaaaaggagccaatcctaatgcaatcaactcatccacaggccgcacagctttaatggaagcgtcaagagaaggggtagtggaaatagttcgaggcatattggaaagaggaggtgaagtgaatgcatttgacaacgacaggcatcacgctgctcattttgctgctaaaggaggctttttcgatatattgaagcttctttttgcctacaatggagacgtggggctgatttcgataaatgggaacacaccacttcattatgctgccatgggtggttttgcagactgctgtaaatatatagctcagcgaggatgtgacctgaaatggaagaatttagatcataaaacgcccagggctgtggctaaggaaggcggcttcaaagcagcaagcaaagaaatacgccgagcagagagaatcgctaataaactagccaggccaggagccaaaaatccaaatccactgtgggcccttagactgcacgattggtccgtagaacgtgaggctttcctccgggaagcctttgcggttttagacaggggtgatggaagcatcagcaagaacgacttcgtgatggtgttggaggaaaggcaggattatgcaagctcagaacagctggctgccatcgctcaccttcatgagaaaacccggggaggaggggtcaatattaatgaattctttaaaggaaccagatatttaaacaagtcttttgtcttaggatcgtatggacctaagaaaaaggaaaaagggatgggcaaaaaaggaaagaaagggaaatttgtcttaccccttccaatctgtgtcattcctgagtacgcgtttccacgccggcaggatggtgggccaccgtattacatgattgagacctacaagaatgtcactgatagcagccggtttaatagagatcatcccccagaacatcccattcaggatgactctgtttggtacattgatgattcagagaaggtattttcaaacattaatattatcaccaaagcaggggatctggcttctctgaaaaaggcctttgaatcaggaatacctgtggatatgaaggataattattacaaaactccgctaatgacggcgtgtgcaagtggaaacatagatgtggtcaagtttcttcttgaaaaaggagctaacgttaatgcaacagataactttctgtggactccacttcattttgcatgccatgcaggccaacaagacattgttgagcttcttgttgaatctggagctttaatagatgcagcttcaatcaacaactcaactcctttaaatagagccattgaaagctgcagactggatacagtaaaatacctacttgatattggtgctaaattccagctggaaaatagaaaagggcatagtgccatggacgttgcaaaggcatatgctgattatagaataattgatctgattaaagaaaagctagataacttgccgaaaccagcagaaaatcaaaaactaaaaggcaagacacctcctatactgaagactgaaggccctgaaattaagaaagaagaggaactgctgtcatcaatttatggtgtaccaaccacatcagagggaaagaaagtacagaagggtaatgtggttcatctgaattcattgattaccagtggttatactaagaaagtggatatcacatttattccacggaggatttggagtcctgaagccacaacagcagagctgatcaggaagagggaactacggcgagagaggtttacacatgaggtggacttcgacgattttatgatgccttttcagaagaacatcacagagaaagctcgagcactggaagctgccttgaagacctaagtcatagcagttatttcttggggtaaatgctttgaggcccagggaccaatctttggagaaagtagatatttccatcaaagccaaagcaatccatacaccaagaacttgttaccaagaatttctttttgctttaacaactataaatattcttagctgtctagagaaaagatgtatgttattttgaaatgaatggtatgtcattctggataaatccccaagcccctttatgaatgtagtgaaatacatggcatgtgggttataaacgttgctgtcaaaagatttaccaggtctacaccattatgcttattatttttttaattatcctttttatttattaaatagagacagagtctcactatattgccccagctggtctcgaactcttgagctcaggcagtcctcccaacttggccgtcgaaagtgctgggattataggcatgagctactgtgcccagcctgcttattgaagatacatttctagtggaaattgatgaaacaatttaggttttggaaaaagaagtaatatttaatcttttaaggaaggagtttatttctcacatgccattataaactatgtgtattagataccttgggttgaatacacttttaacagccctagatcgatagccctagccctagatagatagccctagccctagatagatagctattaggttggtgcaaaagtaattgtggtttttgccataacctttaattgcagcaaaaactgcaattacttttgctccaacctgacagctaggtatctagctagctagaaaggcagatagacagatatatagatgatagatagatagatgatagatagatagatagatgatagatagatagatagatagatagatagatagatagatagagatttattgcaaataattggtttacataattttgggccccagatggttaagtgctaaatttgtagggtaggctatcaggaagtgcaggctggaaacatgcaggagctgtccctgaagtccacaagtggaatttcttcttcatcatggaaacctcagttttgttcatacacctaaatacttcagtatgtctttcctaaaataaaaggcatccatttacctaaaaaaaaaaaaaaaaaa

SEQ ID NO: 47 - DNA, 579 bp, homo sapien
  misc_feature (537)..(537): n is a, c, g, or t
ttgtagactggggaggagaatcctttatggtcacaaatgcttctggctcatcgaatgggttcaaatactgtggagtctgcacctctttaaagggattatagctgttattataaaaagagtcttctgtttttctaggtgaagctgtttcagtgataggttcttctgagtcaggatctccaaatggatttaattctgcagcatcaggatcatcaaatggatttgaattcacggtggccaagtccttttctgcttcatccaaaaagttaagtttgttgataagctctgtaattttagctgccttttcttcttggttcactctgttctcatcatcatcttcattatcttcttcgaagtcatctaaattgccaatgtcagcctgcttcatactcatcaaactagccaaactttgcatgtcttcatctgtggcttttccttccctcagaaaaatgcaagataatgaaaactgaagagcggcagatacaacttttttagataatggcttgaattttaacttgacatcagtctgagttggcatanggcttgcatactgtttcatattgatgctgctagtagcaagag

SEQ ID NO: 48 - DNA, 1409 bp, homo sapien
ggaatacaaagtctccagctgtgaacagagactcatcagtgaaatagagtacaggctagaaaggtctcctgtggatgaatcaggtgatgaagttcagtatggagatgtgcctgtggaaaatggaatggcaccattctttgagatgaagctgaaacattacaagatctttgagggaatgccagtaactttcacatgtagagtggctggaaatccaaagccaaagatctattggtttaaagatgggaagcagatctctccaaagagtgatcactacaccattcaaagagatctcgatgggacctgctccctccataccacagcctccaccctagatgatgatgggaattatacaattatggctgcaaaccctcagggccgcatcagttgtactggacggctaatggtacaggctgtcaaccaaagaggtcgaagtccccggtctccctcaggccatcctcatgtcagaaggcctcgttctagatcaagggacagtggagacgaaaatgagccaattcaggagcgattcttcagacctcacttcttgcaggctcctggagatctgactgttcaagaaggaaaactctgcagaatggactgcaaagtcagtgggttaccaaccccagatctaagctggcaactagatggaaagcccgtacgccctgacagtgctcacaagatgctggtgcgtgagaacggggtgcactctctgatcatagagccagtcacgtcacgtgatgccggcatctacacatgtatagctaccaaccgagcaggacagaactcattcagcctggagcttgtggttgctgctaaagaagcacacaaaccccctgtgtttattgagaagctccaaaacacaggagttgctgatgggtacccagtgcggctggaatgtcgtgtattgggagtgccaccacctcagatattttggaagaaagaaaatgaatcactcactcacagcactgaccgagtgagcatgcaccaggacaaccacggctacatctgcctgctcattcagggagccacaaaagaagatgctgggtggtatactgtgtcagccaagaatgaagcagggattgtgtcctgtactgccaggctggacgtttacacccagtggcatcagcagtcacagagcaccaagccaaaaaaagtacggccctcagccagtcgctatgcagcactttcggaccagggactagacatcaaagcagcgttccaacctgaggccaacccatctcacctgacactgaatactgccttggtagaaagtgaggacctgtaatccagcattcttgttaaagctgaaacactgaaacagccattgccttgaccaacatattcctttgtcacattatgtaaaaggcagaaacatacctttgactataagaaattaaaaaaaaaaaaaaaaa

SEQ ID NO: 49 - DNA, 3839 bp, homo sapien; identical to SEQ ID NO: 46

SEQ ID NO: 50 - DNA, 668 bp, homo sapien
  misc_feature (567)..(567): n is a, c, g, or t
  misc_feature (612)..(612): n is a, c, g, or t
  misc_feature (621)..(621): n is a, c, g, or t
  misc_feature (626)..(626): n is a, c, g, or t
  misc_feature (646)..(646): n is a, c, g, or t
accacctgactcagacttctttgtcgttgttttatttaaaatgttattgtctctgattagaaaatacagtcatgagggctaaaaactgaaatgatgtgaaaaggcatccattaagcagtgttgccccaccaccctttccatcagtcttgtctcatggggatggggaaaatgaagacagaacgctttgccttgctttgcaatccctcctttgaaggccttctgtcccaggaagccaatgttcatttgatgtggaagagggacctgtgtttaaccagaagctgtcctccctcatccctttcccatggcttacacgcagaagggagaggagatgaccagaggagaaatcaggggaagaaaaggcaacaggggaggcaaagggaaaggagaggaatgcttaaaatatacagtgaaatttgagtaggattctctactcaaagacttctctgggaagtgtccagaattgaccacacaggtgctgacggtagaaagaacacagacccaaaaccctgatctagttgcattaactccattagccctgagttccctgtaaaatgaagactgtggagnaccactagaggattctgtgacttctcaactctaaaatttggactngacctcgtncgatnttggctcgaggcaaattccnatatggtcgattaatcgaacca

SEQ ID NO: 51 - DNA, 554 bp, homo sapien
  misc_feature (108)..(108): n is a, c, g, or t
caaaataacataaatcttttattgaaagtcactttactaatgttacaatgggagtaacatagaaaaccatggtatcttattagcttccgaagtgaatactaataaaanctgtgccagagaatttgaaccttaagttacagtgacctttaaaaacatcaagattttgtttacctacaatgtaagaacaattttataacttgaacagccataaaacaaatcacacttgctcaggaaagcagttgccatatacatttccattggtgtttgccataaccccagtaattattaaaatagcttaacgaacctgaagtgcagagtagcagagaaatgttaaaataatgcgaatcttagtatatacacatgattacctgattaccaaaagtgaaaccatgctgctattaacacctcctcatggggtggcttccactatctatagatgcacatcacctgtcaaaggtgataaccgtggaaaacactagtgccgacctactgctggctaacatgtaagctactatgtttaggtaaaacaccccgtttctgaaagaagttgtctt

SEQ ID NO: 52 - DNA, 752 bp, homo sapien
tttatgaataaaatatttaatcaacttatctgtacaaaatattaaaatggttaatgaagagtatacaagcatgttcaacaaatatatactgctatataatagttaagaaaaatagagattgctgttttacatgtcatttacatttcactatgtacaatctatttaaatttgagaatatatatgcacataggtttctaccagccctgggagggctccctgctagctggcctgggcatcggcaacacctcacaatgtcagcttgcattgcccaaataaacacccaggccaggcagcaaggagacagcccagcctgcaagcctcggagttctgctgtggctacaccagcaggaagactgctgatgaaggagatttcagtttgccttaaatgagtttctaatgtccccccacactccaatctccttacttccaagccaagctaagaaaaagtgggtgtcactgcaaagcgaaaggatttctatcccctcaccaaaataattctttttgtctttagctgctgaggaaatggcatgttactgagccttgatggcattactggcactttgagttttaccgtttccttaaaatcacagtactggaatcaggtgaaatttgctttctaagctgcagccactcgtcatgtgcagaattctgctgcccacccaagtcctggcttaaacagcccgcatttttataaagctggttacggggagcttctggcaacaaaccttttaacagaaaccctcgtggcccga

SEQ ID NO: 53 - DNA, 3037 bp, homo sapien
atcacagcactgggcaggaacagcacggccagggcaggaggacaacaacctccagggaaggggcaaggaagcctggacagggcaagagcgtgtcaagaagctgccgacaatgtcaaccaggcagataaggccgaggagtccctcgtggcatttcacaacaaggtgacatttgccagatcagtttagccgagctggggcggctgccagggttaaagaggaacaaggcgggagggtggggaggatgtggaaggagagagtgcagacagctcttttaagaggtttggctgtggtgggccaagatgaccgccaagctcagctgagaggccagggtgtgggtggcgggagaggcctgggaggcatctgctggaggatggtgggagaagatgggagaagttgggagggggccgtaaggagagagtggggtgaagggcaggggcaaatgcagaaccgtggagctggagctggcctagagtggggcaggagcaggtgccaggcacctccttgaaacagccaccctcactccgtaggccggaaacatgatgcaatcacatgtcatttaatcatcataacacctttgagaacacattattacaggcatgtttcagatgagggtactgaggctcagagaggatcagtgacttgtacagagtcacccagatggaatggcctggactgccactccaaggatcaaaggccaaagtgttccctgctgacccaccagcactccccagctcctctcatgcgtcccccatcacctgggctcccatccagactttgccgctccaccagctgtgtgcctccgggcaagacacaacccttctttgagccttggtttccccatctgtcaaataatagcagctgggcacagtggcttacacctgtaatcccagcactttggagggccgagatgggtggatcacctgaggtcaggagttcaagaccagcctggccaacatggtgaaacctcgtctctgctaaaaatacaaaaattagccaggcgtggtggcgggcgcctgtaatcccagctactcaggaggctgtggcaggagaattgcttgaacccgggaggtggaggttgtggtgcgctgagattgcgccactgcactccagcctgggtgacagagtgagactccgtctcaaaaaaataataatagcaaccacaagctgcaaagatcacagtgttccgaagctggggtgcaaggctgtgcggggggaggccatggggaccgggaagtaaatgtcttcgtgccaggcaggagaggccattagcacccttggagggggcagagcccatggcagggggctgagtgggtaactggagaggcagcaggcaagggaggggtttttcccagctcagaatggcttgagctcatttggatcagcagggagagaggcggtggagggcgaggaactgttttgccagagtacagaggcaggccctcatgattctgccactgcctcctcagtgcagggccccacatggccttggtacacacataaggtacacacaccatcctcagactctccaggtggccctgccacaggaagggagctgaggccctgggctaaagggctggccacaggtcgccctttgaacttgagactgcctaaatccaaagctgaccctgagactggaagaagaacccctcccaacggaggccttaaaggaaggaggggaggggaccagggttccgggggtcatggtggaacaagaacaagctcgctgactgacagcctgggggaactcaggacaccagcaccagccacttgggagattgtgcggggggagccacttctgagccagtgaggaccccaggaccagcctgggccctcccgctcaggtttttggagtactggaagatcaactgagatttcacccaagtttcttgccactgacaaaatgaccactacttgggtacgaggcagattaggtaggcctctcagctgcaattcaagctagtgtaagcaaaaacggggataattgaactgaaaaagtgaatggcttcagacctggctggatccaggtacccatggcggctaccgggaccctctctcatgctctccacctctcggctctgctgtcctcaatgctggcttcattctcagaaggctctccccactgttggcaaggatggcccccagcagctccaggcccatacctggccagctcagcagccccagcggacagagggagcctttcttttcttttttcttttattttttatttatttatttattttgagatggcgtctcgccctgtggcccaggctggagtgcagtggtgtgatctcagcccactgcaacctccgcctcccggattcaagcgtttctcctgcctcagcctcctgagtagctgggactacaggcatgcaacaccaggcccggctaatttttgtatttttagtggagacggggtttcaccatgttggccaggatgatcttgagctcttgacctcgtgatctgctcgcctcggcctcccaaagtgctgggattgcaggcgtgagccaccgctcccggcaagggaggctttcttaatggcgccagcgaaagtccgagggccaacgcccattggactaacttgggtcatgtgtctgtctctgaagtagtcactgggtctgacccttcctggcttggacgacatactcctgtttagagctgaaagtggaaagtctgccagaaaacgggaggcggagcaggcctggcagggaggtccatggcacttcctcccctcatgcccagggccccgcccccgactccactcccagacctcagagctggagcatctgcaacttctgatcagactccagcccacctcacccctgcatgcagaaataggggtgctacaaggggaagcggggagggtgtgtggggtaccgaaatgacctgggacagacctgggttcccattcagactttgtgtctgaatgggacacaaagctgtgtgtctccgggcaagtcactgactctctctgggcctcagtattcccatctgtaaactaataataacaatcaacacattgacagcaaaaaaaaaaaa

SEQ ID NO: 54 - DNA, 2489 bp, homo sapien
gggggctgttgtggtaactggcatccatcggagtagaagtgctaaatgctgtgcattgcatggaacaattccacccaacggagaattaaccctcttaaaatgccaggtgtgttcctgctaataagcactgataaaagcacaaagaaaacctaactatttgccattgtacaatggcatcagagcagccacactgcagatttcttggttgatgcccaagagtttagtgggaggaaatcactaaattatttttatctgcattttgaaggggtcaggctatgctgggaattgtttttcattaggccagagtcccacagttggatcgagctatagctctgctcaggtcatttgttggtctacatcgggacctagaagccacagagttggtgagtgcagcctgtccttgggcgctatcagatcaccccagtccccagaggggatgctggtggctggcatagtgatggagaactggccacaaaggaatatctttccagaggtttgttgtttttgtttttgtttttgttttttttggtggtggtggtggtggtgttttttgctgtaacaggcaaaggagcagaacactcagaattaaatggtctgttgtctcataaaaaccaactatgtaatcccagcactttgggaggccaaggcaggcggatcacttgaagtcaggagtccaagaccagcctggccaacatggtgaaaccccatctctactaaaaatacaaaaaaattagctgggcatggtgatgcacgcctgtaatcccagctactccagaggctgaggcaggagaatcacttgaacccggaggcagaggttgcagtgggctgagatagtgccactgcactccagcctgggcgacagggcgatactccatctcaaaaaaaaaaaagacaaaaacaaaaacaaaaaacaaaaacaactatgatgctcttaaagttaaaaaataagcacagtggctaagagaaataattcagtttagctagctctcagaccactgcagactgctgcccactgatccctgcatttctctcttgctttactgtggattggctaattatttcctgatttattcatttattatctaacacacttggagtgcctgctatgtaccagtactaagaaaaagttcctgacttgggctctttatatgcgaagaagggtggcaaatctatctgttactacggagccacgtgccaggtgctaaggtggaggtgtgctcagtgggtccagagagcagagagaaagggcttcaggtgagacctggcagaggttcaggatagcagggaatctcctaagtgtcccaaatgcgctaatgtttgagctagatcctgaaagaaaacaaggagttaaccaaggtgaagaacaaacgagtggaccaggattccagagaaagaacactgtgcaccaagccacagaggcgtgaaacaaaaggctctcagttgtctagtgtggcaagtggcaggggtgcatggggggagggtgtcggagtggtgccctggagacagggagagctgcgacagattcctggggacggatccttctgcagctcaaagataggagaggcccttagacatccctcaaggccatatgtcaatcaaaataattaaaagtaaaagaaccggaaggcaggcttatatattccaacatccatctagtttttcccccaaaaaaagcttttgataaaataagatgaagtgccaaaaagatgcatgtgttcaatagcgcagcagaaagtgaatagagtaaaagtaataaaaaatactcggccgggcatggtggctcacacctgtagtcccagcactttgggaggccaaggcaggtggttcacctgaggttgggagttcaagactagcctggccaacatggtgaaaccccattactactaaaaatacaataattaggcaggcgtggaggcacgcacctgtaaatcccagctacttgggagactgaggcaggagaattgtttgaacccaggaggaggaggttgcagtgagccaagatcataccattgcactccagcctgggtgacaaggcaagactccgtctcaaaataaataaataaataaataaataaaataaaaaataatctctacaaaactgagttattgctaattctgggtagcacagcacaggagagcgtgcttgggtttggagtctgacagaactgagtgcaagtcttggctttactaacttggctaatgccactgtaccagcactttgggaggccaaggggggcagatcacctgaggttaggagtttgagaccagcctggccaacatagtgaaacgccatctctactaaaaatacaaaaattagccgggtgtgatggcacatgcctgtagtcccagctacttgggaggctgaggcacaagaatcacttgaacccaggaggcgggaggttgcagtgagtagaggttgcaacaagctcagatcgtaccactgcactccagcctgggcaacagagcaagactctgtctaaaaaaaaaaa

SEQ ID NO: 55 - DNA, 548 bp, homo sapien
tttttgcaatttaaaaaaatagctttattgaggtatactttgacatgccataaaattcacccattgtatgtgtacaattcaattacttcatttatacaactgttcaattatcaccatattccagcttaatggtcaatatttgctttgtcatttgatcttttctctatggtaagcaaaaatctattatttgaaaggttccttcactgaaagctgggtggagttgaactctaaaattacctacaaaattactttctatctagtcatctatgtctaattcttcaatttgacacatgcatgttactagcacaagctgcattttaaaggcagcaggaaggtcttttactatcattagaagttaactttaaggattgagcaggcacgatacagcatagattgtttcgtgtgctatatagtaaggtcaatattcttgctccttctacaaataaaaaaaagttccacagaataacaagtacaggtggagttcccaacggaaatgcaggtactgaatacaaccaactgcaactgtttctctgctcctcaatcctgct

SEQ ID NO: 56 - DNA, 983 bp, homo sapien
cctggatcctgctgcgagaaggggcgcgatttcttccggagaggttccctgtcgcgcccaagtctgggaagtgccctttctctcttaggtaccacctcatggagacccccgcggccgccgcccccgctgggagcttattcccctccttcctgctcctggcctgcgggacgctggtggccgccttgctgggcgccgctcaccgcctggggctcttctatcagctgctgcacaaggtggacaaggcaagcgtccggcatggcggagagaacgtggccgctgtgctgagggcccatggtgtgcggttcatcttcacgctggtcggtgggcacatttccccgctgctggtggcctgtgagaaactgggcatccgtgtggtggacacacgccatgaggtcacggccgtctttgctgctgatgctatggcccgcctgtccgggacggtgggcgtggcggcagtgacagcaggccctggcctcaccaacacggtgactgcggtgaagaatgctcagatggctcagtccccaatcctgcttctgggtggggctgccagcactctgctgcagaaccggggtgcgctccaggctgttgatcagctgtcccttttccggccacccggttgtggtcaacatcctcattgggaggacggacttccgcgatggctccattgctgtatagggccttgtgggtcaggacgcttggctgccttcctgcccctggactgtgtccagctggtttggagtctcatcattgcttgccctgggcctatcccatgaggcccagtgactccacaacctccctgaggaggggatggaggggtcaaatctcagagaggctctcttgtgagctcttggaccctcctcttcacggacccaactgtgccgtttgtcccctctcttatggagactgaataaaccacctctggcccatgtaggcccaagtactcagtctcagaaaaaaaaaaaaaaaaaaaaaaaaaaaaaaaa

SEQ ID NO: 57 - DNA, 14014 bp, homo sapien
ggaggcggcgctggaggagaagagcgccctggagcagatgcgcaagttcctttcggacccgcaggtccacacggtgctggtggagcgctccacgctcaaagaggacgtcggtgatgaaggagaagaagaaaaagaattcatttcctataacatcaacatagacattcattatggggttaaatccaatagcttggcattcattaaacgtactcccgtgattgatgcagataaacccgtgtcttctcagctccgggtccttacactcagtgaagactcgccctacgaaactttgcattctttcattagcaatgcagtggctcctttttttaagtcctacattagagagtctggcaaggcagacagggatggtgataaaatggctccttcagttgaaaagaagattgcagaactcgaaatgggactccttcacttgcagcaaaatattgaaattccggagatcagcctgccgattcatccaatgatcacaaatgttgcaaaacagtgttatgagcgtggagaaaagccaaaagttacagactttggtgataaggttgaagacccaacatttcttaatcagttacaatctggagttaaccgctggatccgagaaattcaaaaagtgaccaaactggatcgagatcctgcatcaggaactgccttacaggaaattagtttttggctaaacttggaacgtgcgttataccgcatccaggagaaacgggagagcccggaagttctcctgactctggatatcttgaaacatggcaagcgcttccatgccaccgtcagttttgacactgacacaggtctaaaacaggctttggaaactgtgaatgactacaatcctctgatgaaagatttccctctgaatgatttgctgtctgccacggagctggacaaaataagacaggcgcttgttgccattttcacacatttgagaaagatccgaaacacaaaatatcctattcagagggcactgcgtttggtggaggcaatttcaagagacttgagttctcaattactcaaagtattgggcactaggaaattgatgcatgttgcttatgaagaatttgaaaaagttatggtagcatgctttgaagtttttcagacttgggatgatgagtatgagaaacttcaggtattgttgagagacatcgtcaaaagaaaaagggaagaaaatctgaagatggtgtggcgtatcaaccctgcccacaggaagctgcaggcccgccttgaccagatgagaaaatttagacgccagcatgaacagctaagagctgttatcgtcagggtcctgaggccacaggtcacggcagttgcacaacagaatcaaggagaggtccctgaaccccaagatatgaaagtggctgaggttctctttgatgctgcagatgcaaatgccattgaggaagtaaaccttgcttatgagaacgtcaaggaagtggatggactggatgtttccaaagagggcacggaagcctgggaggctgctatgaagaggtacgatgagaggatcgacagagtggagacccggatcaccgctcgccttcgggatcagcttggcacagccaagaatgccaacgagatgtttaggattttctccaggtttaatgcactgtttgtcaggcctcacatccgtggggccattcgcgaataccagacccagctgatccagcgcgtgaaagatgacattgagtctcttcacgacaagttcaaggtccagtacccacagagtcaggcttgtaagatgagtcacgttcgtgacttgccccctgtgtcagggtctatcatctgggctaaacagatcgacaggcagctgacggcctacatgaagcgggtggaagatgtccttggcaagggctgggagaatcacgtggaggggcagaagctgaagcaggatggagacagcttccgcatgaagctcaacacgcaggagatctttgatgactgggcaaggaaggtgcagcagcgcaacctcggtgtctcggggcgcattttcaccatcgaaagtactcgggttcggggccgaactggaaatgtgcttaagctgaaagttaactttcttcctgagattatcacactatccaaagaagtccggaacctcaaatggcttggtttccgcgtcccactggcgattgtgaacaaagcccatcaagcaaaccagctttacccgtttgccatctcactgatcgagagcgttcgtacctatgaacggacctgcgagaaggtggaggagcggaacaccatttcccttttggtggctggcttgaaaaaggaagtgcaggccctgatcgcagaaggcattgcgttggtgtgggagtcctacaaacttgacccatatgtacagcgcttagcagagactgtcttcaacttccaagaaaaggtggatgatctgctgatcattgaagaaaaaatagacctagaagtccgttccttggaaacttgtatgtatgaccataagacattctcggaaatcttgaacagagtccagaaagcagtggatgacttaaatctgcactcctattccaatttgcccatctgggtcaacaagcttgacatggagattgaaagaatattgggcgtccgtctgcaagctggcctgagagcttggacgcaggttcttcttggacaagctgaagataaagcagaagttgacatggacacagatgctccacaagttagtcacaagcctggtggagagccaaagatcaaaaatgtcgttcatgagctaagaataaccaatcaggtaatctacttgaatccaccaattgaagagtgcagatacaagctgtatcaggaaatgtttgcctggaagatggttgtactgtctctccccaggatccagagtcagaggtaccaggtgggtgtacattacgaattgactgaggaagagaaattctatcggaatgctttaacacggatgcctgatggccctgttgccctggaagagtcgtattctgctgtcatgggcattgtatctgaagttgaacagtatgtcaaggtttggcttcagtatcagtgtttatgggatatgcaagctgaaaacatctataacagacttggagaagatctcaacaaatggcaggctctcctggtccaaataaggaaggccagaggaacctttgacaatgcagaaaccaagaaagagtttggaccagtagttatagattatggcaaggtacaatctaaggtgaacttgaaatatgactcttggcataaggaggttcttagcaaatttgggcagatgctaggatcaaacatgacggaattccattcccagatctcaaagtcccgccaagagttggagcagcactcagtagacacggccagcacctccgatgcagtgaccttcatcacctatgtgcagtctttgaaacggaagatcaagcagtttgagaagcaagttgagctctaccgcaatggccagcgcttactggaaaagcaaaggttccagttcccaccttcctggctttatattgacaacatcgagggagagtggggagccttcaatgacatcatgcggcgaaaggactctgccattcagcagcaggtggcaaacctgcaaatgaagattgtccaggaggatcgggccgtggaaagccgcaccaccgacctgctgactgactgggagaagaccaagcctgtcacgggcaaccttcgcccagaagaggcacttcaggctctcaccatatatgaggggaagtttggtaggctgaaggacgacagagagaagtgtgcaaaggccaaggaggcgctggaattgacagatactgggcttctcagtggcagtgaagagcgcgtgcaggtggccttagaagaattacaggacctcaaaggcgtttggtcagaactttctaaggtttgggagcaaatcgatcagatgaaggagcaaccctgggtttcagtacagcctcgaaagcttcgacaaaatttggatgccctcctgaaccagctgaaaagcttccctgcccggttgcgacagtatgcgtcctatgagtttgttcagaggcttctgaaaggttacatgaagataaatatgctggtgattgaactgaaatccgaagcacttaaagaccgccattggaaacagctcatgaaaaggcttcacgttaattgggttgtttctgagctaacccttggccaaatctgggatgttgacttgcagaaaaatgaagcgattgtcaaggatgtactgcttgtggcacaaggggagatggctttggaagaatttttgaagcagataagagaagtgtggaatacttatgaactagacttggttaattatcagaacaagtgccgcttgatccgtggctgggatgacctcttcaacaaggtcaaagaacacatcaacagcgtctcggccatgaagctctctccgtattacaaggtttttgaagaggatgctctcagctgggaagataagctgaacaggatcatggctctctttgatgtgtggattgatgtgcagaggcggtgggtctacctggaaggtatcttcacaggcagtgcagatatcaagcacctgctgccagtggaaacccagcggtttcagagcatcagcactgagtttttggctctaatgaaaaaagtgtccaagtctccccttgttatggatgttctgaacatccagggagtacagaggtctctggaaagattggcagacctgctaggaaagatccagaaagcattgggagaatatctggaaagagagcggtcatctttccccaggttctattttgtgggtgatgaagatttgcttgaaatcattggaaacagcaagaatgtcgctaaattacagaaacacttcaagaagatgtttgctggagtttcgagcatcatcctgaacgaggataactctgttgttttgggtatttcatctcgggaaggagaggaggttatgtttaaaactcctgtgtcaattactgaacatcccaaaatcaatgagtggctcacattggtagaaaaggagatgagagtcaccctggccaaactgcttgctgagtctgttacggaagttgagatttttggtaaagcaacttcaattgacccaaatacctacatcacttggattgataaataccaggcccagcttgtggttttgtcagcccagatagcctggtctgagaacgtggagaccgcactgagcagcatgggcggaggtggagatgccgcgcccttgcactctgtgctgagcaatgtggaggtcaccctcaatgtgttagcagactctgtcctcatggagcagcccccactccgaaggcggaagctagaacacttgattacagagttggttcaccagagagatgttacaaggtccttgatcaaaagcaagattgacaacgccaaatcttttgaatggctcagccagatgcgattttactttgaccctaagcaaactgatgtgttacagcagttgtcaattcaaatggcaaatgccaaatttaactatggctttgagtacctgggtgttcaggacaaactggtccagacccccctcactgaccgctgctatttgacaatgacacaagccttggaggccaggctggggggttccccatttggacctgctggaactgggaaaacagagtctgtcaaagctcttggccatcagcttggacggtttgttttagttttcaactgtgatgaaacctttgatttccaggcaatgggccggatctttgtgggcctttgccaggtgggtgcctggggctgctttgacgagttcaaccgcctggaggagcggatgctctcggctgtgtcccagcaggtgcagtgcatacaggaagcactgcgtgaacattccaaccccaactacgacaagacctctgcccccattacttgtgagctgctgaacaaacaagtcaaggtgagcccggacatggccatcttcatcaccatgaaccctggctacgcgggccggtctaaccttcctgacaacttgaagaagctgttccggagcttggccatgaccaagcccgaccggcagttaatcgcccaggtcatgctgtactcacagggtttccgcactgctgaagtgcttgccaacaaaatcgtcccgttttttaaactatgcgatgagcagctctcttcccaaagccattatgacttcggtcttcgggctttgaagagtgtgctggtgagtgcaggcaatgtgaagagagagagaatccagaagataaagagggagaaagaggaacgaggggaagcagttgatgaaggagaaattgctgaaaatctccctgaacaagagattctgatacagagcgtctgtgagacgatggtgccaaagctggtggcagaggacatcccgctgctcttcagcctcctgtcggacgtgttccctggagtccagtatcacaggggtgagatgactgcccttcgagaggagctgaagaaagtgtgtcaggagatgtatttgacatatggagatggagaagaagttggtggaatgtgggttgaaaaggttctccagctctatcagatcacccagatcaatcatggcctgatgatggtggggccctcgggaagtgggaagagcatggcctggcgtgtcctgctgaaggcattggagagactcgagggtgtggaaggtgtggcccatatcatcgaccccaaggccatcagcaaagaccacctctacggaaccctggaccccaacaccagggaatggacagatgggctcttcacacacgtgctgagaaagatcatcgacagcgtgagaggcgagctgcagaagcgccagtggatcgtcttcgatggcgatgtggatccagagtgggttgagaacttgaactcagtgctggatgacaataagctcctaactttgcccaatggagagcgcctcagtcttccacccaatgtgagaataatgtttgaggtacaggacttgaaatacgcgaccttggccacagtgtcgcgctgcggcatggtctggttcagtgaggatgtgctgagcaccgacatgatcttcaacaacttcctggccaggctgcgcagcatcccgctggatgaaggggaggatgaggcacagcggcggcgtaagggcaaagaggatgagggggaggaggccgcttcccccatgctgcagatccaaagagatgcagctacgatcatgcaaccgtacttcacgtccaacggcctggtcaccaaggcgctagagcacgccttccagctggagcacatcatggacctaacacgcctgcgctgcctgggctcgctcttctccatgctgcaccaggcctgccgcaacgtggcgcagtataacgccaaccatcccgacttccccatgcagatcgagcagctggagcgctacattcagcgatatctggtttatgccatactctggtccctgtctggagacagccggctaaaaatgagagcagagctgggtgaatacatcagaagaatcacgaccgtgcctctgcccactgcgcccaacatacccattatcgattatgaggtgtccatcagcggagaatggtctccgtggcaggccaaggtgcctcagattgaagtggagacgcacaaggtggcagcccctgatgtcgtcgtgccaacgctggacacagtccgccacgaagccctcttgtacacttggctggccgaacacaagcccctggtcttgtgtggccctcctgggtctggcaagaccatgacactcttcagcgccctccgggccttgcctgacatggaggtggtgggtctcaacttctccagtgctactactccagagctgcttctgaagacttttgatcactactgcgagtacaggcgcacacctaatggggtggttttggctcctgttcaacttggaaagtggctggtgttgttctgtgatgaaatcaacttgccagatatggataaatatgggacccagagggtcatatccttcatcagacagatggtggagcacggaggcttttaccgtacctcagatcaaacatgggtgaagctggagagaatccagtttgttggggcttgtaatccccccacagaccctggaagaaagcccctctcacacaggttcctgcgccacgtgcctgtcgtgtatgtggattacccgggccccgcctccctcacacagatctacggcaccttcaaccgcgccatgctgaggctcattccatccctgcggacgtatgcagagccgctcactgctgccatggtggagttctacaccatgtctcaggagagattcacccaggatacacaacctcactatatctattcaccccgtgaaatgactaggtgggtgagaggcatctttgaagcgctgagacctctggagaccctgcctgttgaaggcctcattcggatttgggcacatgaagctctgcgtctcttccaagatagactcgtagaggatgaggagaggcgttggactgatgagaacatcgacacggttgctctgaagcacttccctaacatcgacagagagaaggcaatgagccgacccatcttgtacagcaactggctgtcaaaggattacatcccagtagaccaagaagagttaagagattatgtcaaagctaggctgaaggtcttttatgaagaagaacttgatgttccgctggtgctgtttaatgaagtcctagaccacgtgctgaggattgacagaatattccgtcaacctcaaggccacttgcttctgattggtgttagtggagcaggaaaaactaccctgtctcgtttcgtcgcctggatgaacggtttgagtgtgtaccagattaaggtccataggaagtacacaggggaagactttgatgaagatctacggacagtgttgagacgttctggctgtaaaaatgaaaagatagcatttataatggatgaatctaatgtgttagattctggattcctggagcgaatgaatacccttctggccaatggagaggtgcctggtctctttgaaggagacgagtatgccaccttgatgacgcagtgcaaagagggggcacagaaggaaggcctgatgctggactcgcacgaggagctctacaagtggttcactagccaggttatccgcaacctccacgtcgtgttcaccatgaacccgtcctcggagggactcaaggaccgggcagctacatcaccagcacttttcaacaggtgtgtgttgaattggtttggagactggtccaccgaagcactgtatcaggttggcaaagaattcacaagtaagatggatctggagaagccaaattacatcgtgcctgattacatgccagttgtgtatgataagctgccgcagccaccatcccatcgggaagccattgtgaacagctgtgtgtttgttcatcagactcttcaccaggcgaatgctcggctagcaaagcgaggcggcagaacgatggccatcacccctcgccactacctggacttcatcaatcactatgccaacctgttccacgagaagcggagcgagctggaggagcagcagatgcacttgaacgtggggctcaggaagatcaaagagacagtcgaccaggtagaagaactgcgtcgtgacttgaggataaagagccaagagctggaggtgaagaatgcagcagccaatgacaagctgaaaaagatggtgaaagaccagcaggaggctgaaaagaagaaggttatgagccaagaaatccaggaacagctgcataagcagcaggaggtaattgcagacaaacagatgagtgtcaaagaagatcttgataaggtggaacctgccgtcattgaggcccagaatgctgtgaagtcgatcaagaagcagcacctggtggaggtgaggtccatggccaaccctcctgctgctgtgaagctggcgctggagtccatctgcctgctgctgggggaaagcaccacagactggaagcagatccgctccatcatcatgcgggagaacttcatccccaccatcgtcaacttctctgcagaggagatcagtgacgccataagggagaagatgaagaaaaattacatgtccaatccaagttacaattatgaaattgtgaatcgggcttccctggcttgcggccctatggtgaaatgggcaattgcacagcttaactatgcagacatgttaaagagagtggagcccctacgcaatgagctgcagaagctggaagatgacgccaaggacaaccagcagaaggccaacgaggtggagcagatgatccgagacctggaagccagcatcgcccgctacaaggaggaatacgccgtcctgatctcagaggcccaggccatcaaggcagacctggcagctgtcgaggcaaaagtaaaccggagcactgctcttctgaagagcttgtctgctgaacgtgaacgatgggaaaaaacaagtgaaactttcaaaaaccagatgtccaccattgctggggactgtctcttgtcagctgcgttcattgcctacgcgggttactttgaccagcagatgcgtcagaacttgttcactacctggtcccatcacctacagcaagccaacatccagttccgtacagatattgccaggacggaatacctttccaatgctgatgagcgtcttcgctggcaggccagctccttgcctgctgatgacctttgcacagaaaatgccatcatgctgaaacgattcaataggtatccgctgatcattgacccctctggacaggccacagaattcattatgaatgaatataaggatcgtaagatcacacggaccagcttcctggatgacgccttcagaaagaacttagagagtgcactgagattcggtaacccccttctggtccaggatgtggaaagctacgatccagttttgaacccggtgctgaaccgtgaagtgcggcgaacaggggggagagtgctgatcactctcggggaccaggacatagacctgtcgccatcgtttgtcatcttcctgtccacccgggatccaactgtcgagttcccaccagatctctgttcccgggttacttttgtaaacttcacagttacccgtagcagtttacaaagccagtgtctaaatgaagtacttaaagcagaaagacctgatgtggacgagaaacgatctgatcttcttaaacttcaaggggaatttcagctccgtttgcgtcagctggaaaaatctctactacaagctctgaacgaggtgaaagggcgcattttggatgacgacacgatcataaccactctggagaacctgaagagagaggctgcagaggtcaccaggaaagttgaggagacggacattgtcatgcaggaggtggagaccgtgtcccagcagtacctcccgctctccaccgcctgcagcagcatctacttcaccatggagtccctcaagcagatacacttcttgtaccagtactccctccagtttttcctggacatttatcacaacgtcctatacgagaacccgaacctgaagggtgtcaccgaccacacacagcgcctgtccattataacaaaggacctcttccaggtggcgtttaaccgagtggctcgaggcatgctgcatcaggaccacattacctttgccatgctgctggcaagaatcaaactgaagggcaccgtgggggagcccacctacgatgcagaattccagcacttcttgagaggaaatgagattgtcctgagtgctggctccacccccaggatccagggcctgactgtggagcaggcggaggcggtggtgaggctgagctgccttcccgcgtttaaggacttgattgcaaaggttcaggcagacgagcaatttggcatctggctggacagcagctccccggagcagactgtgccctacctctggagtgaagaaacacctgcaacacccattggccaggccatccaccgcctgctcctgatccaggctttccggcccgatcgcctgttggccatggcccacatgtttgtttcaacaaaccttggggagtctttcatgtccatcatggagcagccgctcgacctgacccacattgtgggcacagaggtgaagcccaacactcctgtcttaatgtgctctgtgcctggttatgatgccagtggacatgtcgaggaccttgcagccgagcagaacacgcagatcacttcaattgcaatcggctctgcagaaggctttaaccaagcagataaggcaataaacaccgctgtaaagtcgggcaggtgggtgatgctgaagaatgtgcatctggccccagggtggctgatgcagctggagaagaagttgcattccctgcagccgcatgcctgcttccgactcttcctcaccatggagatcaaccccaaggtgcctgtgaatctgctccgtgcgggccgcatctttgtgttcgagccaccgccaggggtgaaggccaacatgctgaggacgttcagcagcattcccgtctcacggatatgcaagtctcccaacgagcgtgcccgcttgtacttcctgctggcctggtttcatgcgatcatccaagaacgcttacgatacgcaccactggggtggtcaaagaagtatgaatttggagagtctgacctgcggtcagcttgcgatacggtggacacgtggctggatgacacggccaagggcaggcagaacatctcaccggataagatcccgtggtctgcactaaagaccttaatggcccagtccatttatggcgggcgcgtggacaacgagtttgaccagcgtctgctcaacaccttcctggagcgcctgttcacaaccaggagtttcgacagtgagtttaagctggcatgcaaggtcgacggacataaagacattcaaatgccagatggcatcaggcgagaggagtttgtgcagtgggtggagttgctccccgacacccagacgccctcctggctgggcctgcccaacaacgccgagagagtcctccttaccacacagggtgtggacatgatcagtaaaatgctgaagatgcagatgttggaggatgaggacgacctggcctacgcagagactgagaagaagacgaggacagactccacgtccgacgggcgccctgcctggatgcggacactgcacaccaccgcgtccaactggctgcacctcatcccccagacgctgagccacctcaagcgcaccgtggagaatatcaaggatcctttgttcaggttctttgagagagaagtgaagatgggcgcaaagctgcttcaggacgttcgccaggaccttgcagatgtcgtccaggtgtgcgaaggaaagaagaagcagaccaactacttgcgcacgctgatcaacgagctagtgaaagggatcttgcctcggagctggtcccactacacggtgcctgccggcatgaccgtcatccagtgggtgtccgacttcagcgagaggatcaaacagctgcagaacatctcactggcagctgcatctggtggcgccaaggagctaaagaacatccacgtgtgcctgggtggcctgttcgtgcctgaggcgtacatcactgccaccaggcagtatgtggcccaggccaacagctggtccctggaggagctctgcctggaagtcaacgtcaccacctcacagggcgccacccttgacgcttgcagcttcggagtcacgggtttgaaacttcaaggggccacgtgcaacaacaacaagctgtcactgtccaatgccatctcaaccgcccttcccctgacgcagctgcgctgggtcaagcagacaaacaccgagaagaaggccagtgtggtaaccttacctgtctacctgaacttcacccgtgcagacctcatcttcaccgtggacttcgaaattgctacaaaggaggatcctcgcagcttctacgagcggggtgtcgcagtcttgtgcacagagtaaacttttctagctgcccctttctgtaatagtgaaagttggtatttaacatttattcatttttaaaatatttggaaggtctgagcttgtgaaaagaaagtggttggtctgaggttggaggaagctgaatggaatctgacggttgggagtggtggaaattggaaggataccaggaggtatttgggaaggccaatggcgtggctcctttgaggaaataaaacactaagcatg

SEQ ID NO: 58 - DNA, 4279 bp, homo sapien
gaattccgcccccctcagaggcgccggagcccggaatcccgctcggagccagccagccgtcccgagctaccagcaggtttcattgaaaacagatcctgcaaaagttccaggtgcccacactggaaacttggagatcctgcttcccagaccacagctgtggggaacttggggtggagcagagaagtttctgtattcagctgcccaggcagaggagaatggggtctccacagcctgaagaatgaagacacgacagaataaagactcgatgtcaatgaggagtggacggaagaaagaggcccctgggccccgggaagaactgagatcgaggggccgggcctcccctggaggggtcagcacgtccagcagtgatggcaaagctgagaagtccaggcagacagccaagaaggcccgagtagaggaagcctccaccccaaaggtcaacaagcagggtcggagtgaggagatctcagagagtgaaagtgaggagaccaatgcaccaaaaaagaccaaaactgagcaggaactccctcggccacagtctccctccgatctggatagcttggacgggcggagccttaatgatgatggcagcagcgaccctagggatatcgaccaggacaaccgaagcacgtcccccagtatctacagccctggaagtgtggagaatgactctgactcatcttctggcctgtcccagggcccagcccgcccctaccacccacctccactctttcctccttcccctcaaccgccagacagcacccctcgacagccagaggctagctttgaaccccatccttctgtgacacccactggatatcatgctcccatggagccccccacatctcgaatgttccaggctcctcctggggcccctccccctcacccacagctctatcctgggggcactggtggtgttttgtctggacccccaatgggtcccaaggggggaggggctgcctcatcagtggggggccctaatgggggtaagcagcaccccccacccactactcccatttcagtatcaagctctggggctagtggtgctcccccaacaaagccgcctaccactccagtgggtggtgggaacctaccttctgctccaccaccagccaacttcccccatgtgacaccgaacctgcctcccccacctgccctgagacccctcaacaatgcatcagcctctccccctggcctgggggcccaaccactacctggtcatctgccctctccctacgccatgggacagggtatgggtggacttcctcctggcccagagaagggcccaactctggctccttcaccccactctctgcctcctgcttcctcttctgctccagcgccccccatgaggtttccttattcatcctctagtagtagctctgcagcagcctcctcttccagttcttcctcctcttcctctgcctcccccttcccagcttcccaggcattgcccagctacccccactctttccctcccccaacaagcctctctgtctccaatcagccccccaagtatactcagccttctctcccatcccaggctgtgtggagccagggtcccccaccacctcctccctatggccgcctcttagccaacagcaatgcccatccaggccccttccctccctctactggggcccagtccaccgcccacccaccagtctcaacacatcaccatcaccaccagcaacagcaacagcagcagcagcagcagcagcagcagcagcatcacggaaactctgggccccctcctcctggagcatttccccacccactggagggcggtagctcccaccacgcacacccttacgccatgtctccctccctggggtctctgaggccctacccaccagggccagcacacctgcccccacctcacagccaggtgtcctacagccaagcaggccccaatggccctccagtctcttcctcttccaactcttcctcttccacttctcaagggtcctacccatgttcacacccctccccttcccagggccctcaaggggcgccctaccctttcccaccggtgcctacggtcaccacctcttcggctaccctttccacggtcattgccaccgtggcttcctcgccagcaggctacaaaacggcctccccacctgggcccccaccgtacggaaagagagccccgtccccgggggcctacaagacagccaccccacccggatacaaacccgggtcgcctccctccttccgaacggggaccccaccgggctatcgaggaacctcgccacctgcaggcccagggaccttcaagccgggctcgcccaccgtgggacctgggcccctgccacctgcggggccctcaggcctgccatcgctgccaccaccacctgcggcccctgcctcagggccgcccctgagcgccacgcagatcaaacaggagccggctgaggagtatgagacccccgagagcccggtgcccccagcccgcagcccctcgccccctcccaaggtggtagatgtacccagccatgccagtcagtctgccaggttcaacaaacacctggatcgcggcttcaactcgtgcgcgcgcagcgacctgtacttcgtgccactggagggctccaagctggccaagaagcgggccgacctggtggagaaggtgcggcgcgaggccgagcagcgcgcgcgcgaagaaaaggagcgcgagcgcgagcgggaacgcgagaaagagcgcgagcgcgagaaggagcgcgagcttgaacgcagcgtgaagttggctcaggagggccgtgctccggtggaatgcccatctctgggcccagtgccccatcgccctccatttgaaccgggcagtgcggtggctacagtgcccccctacctgggtcctgacactccagccttgcgcactctcagtgaatatgcccggcctcatgtcatgtctcctggcaatcgcaaccatccattctacgtgcccctgggggcagtggacccggggctcctgggttacaatgtcccggccctgtacagcagtgatccagctgcccgggagagggaacgggaagcccgtgaacgagacctccgtgaccgcctcaagcctggctttgaggtgaagcctagtgagctggaacccctacatggggtccctgggccgggcttggatccctttccccgacatgggggcctggctctgcagcctggcccacctggcctgcaccctttcccctttcatccgagcctggggcccctggagcgagaacgtctagcgctggcagctgggccagccctgcggcctgacatgtcctatgctgagcggctggcagctgagaggcagcacgcagaaagggtggcgggcctgggcaatgacccactggcccggctgcagatgctcaatgtgactccccatcaccaccagcactcccacatccactcgcacctgcacctgcaccagcaagatgctatccatgcagcctctgcctcggtgcaccctctcattgaccccctggcctcagggtctcaccttacccggatcccctacccagctggaactctccctaaccccctgcttcctcaccctctgcacgagaacgaagttcttcgtcaccagctctttgctgccccttaccgggacctgccggcctccctttctgccccgatgtcagcagctcatcagctgcaggccatgcacgcacagtcagctgagctgcagcgcttggcgctggaacagcagcagtggctgcatgcccatcacccgctgcacagtgtgccgctgcctgcccaggaggactactacagtcacctgaagaaggaaagcgacaagccactgtagaacctgcgatcaagagagcaccatggctcctacattggaccttggagcacccccaccctccccccaccgtgcccttggcctgccacccagagccaagagggtactgctcagttgcagggcctccgcagctggacagagagtgggggagggagggacagacagaaggccaaggcccgatgtggtgtgcagaggtggggaggtggcgaggatggggacagaaagggaacagaatcttggaccaggtctctcttccttgtcccccctgcttttctcctcccccatgcccaacccctgtggccgccgcccctcccctgccccgttggtgtgattatttcatctgttagatgtggctgttttgcgtagcatcgtgtgccacccctgcccctccccgatccctgtgtgcgcgccccctctgcaatgtatgccccttgccccttccccacactaataatttatatatataaatatctatatgacgctctt

SEQ ID NO: 59 - DNA, 986 bp, homo sapien
  misc_feature (434)..(434): n is a, c, g, or t
ctcaactatctagcttgtgtgtcatcagaaaggtttatccctttgagagtatcaagttctcagttaatgattcttgctttcatccctccagtatttgctgtgggagctcgttttattctttaatttggaattcagtaatttttcttctttattgacgaattcctcccctcacaaaactgttctttcccacctctctccatatctaattcctgattcttgttatttttaagtcataaatgtagccagtcataaatacataaatgttaaccttcgggttgcaaccttgtctcttgcagtttaaggtaatggatattgtagcccatttgaattttcttcactcttattctcgtaattctggagtttcttcagattgtggtgtattttattgtgctcctatgtaagaatgaagaaattaacctaattaaaacttacanttttcaaacataaaaaaaaaaaaaaagacacaacgaaaccagcaaccaacagggggggccccccaaaaaataatcaccagcgagggggggccccgcaaataggcatcccccaggggtgtggcaccaaaggggcccccctaatggagagggcgacttatgagcctacgaacaagagccgtgcacaacaaccgcgcagcggggggaaacccggccacgcgggcaacatttcggaaagcaacccccaaactctctggtggagtgcaaccactagcggaccacccttccactaccagacatatcgcagcaccaccgggcagaatcaacaacataccacgaggaataagggtggacacagcagaccgtcatattaggtggtgccaaaaaaatcccgcaccgagccgcagatgcaagactacacgggcgagagaaaactccgcacccgccagcccgccacgacacaacagcgacaggcaaaaccacacacaaacactacaccagacacatgacaacgactaatgagacaaggaaagcaaggccacaccaaacaccaac

SEQ ID NO: 60 - DNA, 1980 bp, homo sapien
attccatggcggcgcggcggcgacggagcaccggcggcggcagggcgagagcattaaatgaaagcaaaagagttaataatggcaacacggctccagaagactcttcccctgccaagaaaactcgtagatgccagagacaggagtcgaaaaagatgcctgtggctggaggaaaagctaataaggacaggacagaagacaagcaagatggtatgccaggaaggtcatgggccagcaaaagggtctctgaatctgtgaaggccttgctgttaaagggcaaagctcctgtggacccagagtgtacagccaaggtggggaaggctcatgtgtattgtgaaggaaatgatgtctatgatgtcatgctaaatcagaccaatctccagttcaacaacaacaagtactatctgattcagctattagaagatgatgcccagaggaacttcagtgtttggatgagatggggccgagttgggaaaatgggacagcacagcctggtggcttgttcaggcaatctcaacaaggccaaggaaatctttcagaagaaattccttgacaaaacgaaaaacaattgggaagatcgagaaaagtttgagaaggtgcctggaaaatatgatatgctacagatggactatgccaccaatactcaggatgaagaggaaacaaagaaagaggaatctcttaaatctcccttgaagccagagtcacagctagatcttcgggtacaggagttaataaagctgatctgtaatgttcaggccatggaagaaatgatgatggaaatgaagtataataccaagaaagccccacttgggaagctgacagtggcacaaatcaaggcaggttaccagtctcttaagaagattgaggattgtattcgggctggccagcatggacgagctctcatggaagcatgcaatgaattctacaccaggattccgcatgactttggactccgtactcctccactaatccggacacagaaggaactgtcagaaaaaatacaattactagaggctttgggagacattgaaattgctattaagctggtgaaaacagagctacaaagcccagaacacccattggaccaacactatagaaacctacattgtgccttgcgcccccttgaccatgaaagttatgagttcaaagtgatttcccagtacctacaatctacccatgctcccacacacagcgactataccatgaccttgctggatttgtttgaagtggagaaggatggtgagaaagaagccttcagagaggaccttcataacaggatgcttctatggcatggttccaggatgagtaactgggtgggaatcttgagccatgggcttcgaattgccccacctgaagctcccatcacaggttacatgtttgggaaaggaatctactttgctgacatgtcttccaagagtgccaattactgctttgcctctcgcctaaagcatacaggactgctgctcttatcagaggtagctctaggtcagtgtaatgaactactagaggccaatcctaaggccgaaggattgcttcaaggtaaacatagcaccaaggggctgggcaagatggctcccagttctgcccacttcgtcaccctgtaagtactcagaaccaggaggactagaagactccttttggccagataagactacgttctctattgcagcttctgaaccagagactgatgttgacacactttttttccatttggcaggaatgggagtacagtgccattaggaccagcaagtgacacaggaattctgaatccagatggttataccctcaactacaatgaatatattgtatataaccccaaccaggtccgtatgcggtaccttttaaaggttcagtttaatttccttcagctgtggtgaatgttgatcttaaataaaccagagatctgatcttcaagcaagaaaataagcagtgttgtacttgtgaattttgtgatattttatgtaataaaaactgtacaggtct

SEQ ID NO: 61 - DNA, 2862 bp, homo sapien
ggaaaagtgtgaggggctcttcacgtggggaaggaacagcaggcgcggaggagggggcaagcgtgtgtgagattcagtggtccatgcgtgcgtttgtcgtgtaagggtcattcctggggtttggagtgggggaacaaatcaatgtggctgtttttccgtggaaagaattcccactgcagtgtcccggagcctgcgtgtggtgggcaagctcctcaaatggtatctcacagggaataggggagtcttgaaaacgcagcttcggcagtaggaacatgaacctcttacctaaaagttccagggagtttggctccgttgactattgggagaagttcttccagcagcgaggaaagaaagctttcgagtggtatggaacctacctggaactgtgcggggtgctacataaatatatcaagcccagggaaaaggtgctggtgattgggtgtggcaactcagaactgagtgagcaactgtatgatgtgggctatcgggatatagtgaacatcgacatcagtgaggttgtcatcaagcaaatgaaggaatgtaatgccacccgacggccccagatgagcttcttgaagatggacatgacgcagatggagtttcctgatgcctcgttccaggtggtgttggacaagggcaccctggatgctgtcctgacagatgaggaagagaagaccttacaacaggtggacaggatgctggctgaggttggccgtgtcctgcagggccgggagaccgagtggctctttggcatggatgagggccggaaacagctggcggccagtgctggcttcaggaggttgattacagtggcccttcaccgaggtcagcagtatgaaagcatggaccacatccaagctgagctgtcggctagagtcatggagctggccccagctgggatgcccacccagcagcaggtcccctttctgtctgtgggtggggacattggggtccggaccgttcagcaccaagactgcagccccttgagcggtgactatgtcattgaggatgtgcaaggggatgacaagcgatacttccgtcgactgatcttcctcagcaacaggaatgtggtgcagtccgaagccaggttgctgaaggatgtgtctcacaaagcccagaagaagcggaaaaaggacaggaagaagcagcggcctgctgatgcggaggacctccctgcagccccggggcagtccattgataagagttacctgtgttgtgaacaccacaaagccatgatcgctggccttgccctgctgagaaacccagagctactcctagagatcccactggcattgttggtggtaggcctgggcgggggcagcctccccctctttgtccacgatcattttccaaagtcctgcattgatgctgtggagatcgatccctccatgttggaagtggccacccagtggtttggcttctcccagagtgaccgaatgaaggtccacattgcagatggcctggactatatcgccagcttggcaggaggaggagaagcacggccttgctacgatgtcataatgtttgatgttgacagtaaggacccaacactgggaatgagttgtccgcccccagcatttgtggagcaatcttttctacagaaggttaaaagcatcttgactcctgaaggtgtttttattctcaaccttgtgtgccgagacttggggctaaaagactcagtgctggctgggctcaaggcagtgttccccctcctatatgtccggcgaattgagggtgaagtgaatgagatcctgttctgtcagctgcaccctgagcaaaaacttgccacaccagagctcctagaaacagcccaggctttggagcggaccctgaggaagcctgggaggggttgggatgacacgtatgtcttgtcagatatgctcaagacggtgaaaattgtgtgactgcttaggccaagcagccctcctgcctagactgaccttggactcccagcctgccagagaatgaagaaatacaacgcacagtacttttgaagcttcgtatttttcttggtttcacactcagctacatgtgacctccagcttggtgaggttgcctgaagattagggaaaataaaaatgtccttcccatcttgtcctcttcagtaccacttgggttggtttgtctttgcttcctacaccacgtccttgagtggagttccctgctgaagcccctagcacacactgcatgccttaacaagtgtgtgcaagcccctcagaactcaagacatccaaattttattgcgtctctacttatactggtttgcttttgatttattcctctattagttctataggagtgatctcaagtgagatagcagagcaagatgccaaaagaccataaatagagtaaggtttctatagatgtgagacagatttgagagagcatttactctgtctccctgtggatgaaactgctgctgaaatggttccaatttttaggaatctgcttacccacttcattatttgacagctttccttggtgacccaaaccttgtagcctaagccatttgtctttttctcagtggagggagtgtatggacctggccccatggctttgcatgttagagacctggcagactaaagtctctagtgtttgtttgctcacatttgctgagtgacagctatgtgccagactgcataaagggtggtggcagaagtgaaaatgtttaagaatgaccaaaaacattagtaatgaaagttaatgtgttccaggcattcttctaagtggtttacatgcactgtctcatttaatctgagataaaggatacttaagcccaaactatatctaaacccaaatctcacttggctggaaacatcaatcttaaccatttattcagaaccattaaaccaatgattccaa

SEQ ID NO: 62 - DNA, 855 bp, homo sapien
ggtcccggtgtggctgtgccgttggtcctgtgcggtcacttagccaagatgcctgaggaaacccagacccaagaccaaccgatggaggaggaggaggttgagacgttcgcctttcaggcagaaattgcccagttgatgtcattgatcatcaatactttctactcgaacaaagagatctttctgagagagctcatttcaaattcatcagatgcattggacaaaatccggtatgaaagcttgacagatcccagtaaattagactctgggaaagagctgcatattaaccttataccgaacaaacaagatcgaactctcactattgtggatactggaattggaatgaccaaggctgacttgatcaataaccttggtactatcgccaagtctgggaccaaagcgttcatggaagctttgcaggctggtgcagatatctctatgattggccagttcggtgtggtttttattctgcttatttggttgctgagaaagtaactgtgatcaccaaacataacgatgatgagcagtacgcttgggagtcctcagcagggggatccattcacagtgaggacagacacaggtgaacctatgggtcgtggaacaaaaagttatcctacactgaaaagaagacaaactgagtacttggaggaacgaagaataaaggagattgggaagaaacattctcagtttatgggatatcccattacttctttttgtggagaaggacgtgataagaagtagcgaagatgagggtgaagaaaggagcagaaaaaaaaaaaatggggttattggggggaaaactttgagggctgtctgttcggccctttttaaagggaatgggccctatagggaatgaag

SEQ ID NO: 63 - DNA, 1711 bp, homo sapien
atgctgggggaggggctggcggcctcgacggcagctgcggaactaggccgagggacaaaggctaagtttttccatggtttggactggatatcggtggaactctggtcaagctggtatattttgaacccaaagacatcactgctgaagaagaagaggaagaagtggaaagtcttaaaagcattcggaagtacctgacctccaatgtggcttatgggtctacaggcattcgggacgtgcacctcgagctgaaggacctgactctgtgtggacgcaaaggcaatctgcactttatacgctttcccactcatgacatgcctgcttttattcaaatgggcagagataaaaacttctcgagtctccacactgtcttttgtgccactggaggtggagcgtacaaatttgagcaggattttctcacaataggtgatcttcagctttgcaaactggatgaactagattgcttgatcaaaggaattttatacattgactcagtcggattcaatggacggtcacagtgctattactttgaaaaccctgctgattctgaaaagtgtcagaagttaccatttgatttgaaaaatccgtatcctctgcttctggtgaacattggctcaggggttagcatcttagcagtatattccaaagataattacaaacgggtcacaggtactagtcttggaggaggaactttttttggtctctgctgtcttcttactggctgtaccacttttgaagaagctcttgaaatggcatctcgtggagatagcaccaaagtggataaactagtacgagatatttatggaggggactatgagaggtttggactgccaggctgggctgtggcttcaagctttggaaacatgatgagcaaggagaagcgagaggctgtcagtaaagaggacctggccagagcgactttgatcaccatcaccaacaacattggctcaatagcaagaatgtgtgcccttaatgaaaacattaaccaggtggtatttgttggaaatttcttgagaattaatacgatcgccatgcggcttttggcatatgctttggattattggtccaaggggcagttgaaagcacttttttcggaacacgagggttattttggagctgttggagcactccttgagctgttgaagatcccgtgatcattacctggggaggggttcctgaaaccttccacaatgggatctgtggactttcatttttttaagagacttactcaatttcatgactgtactacctgaaacaaagtgagaaaggacaggtgtatttttctaagtcatcaagataaatccttaagaattcagtctaaattagcaaccaggaaggaaaaatatattaaaaacaacaaaaaagtggcacatgtccaggcagtgtgaggatttgctgtatataagttgcctgctttgtatttttgaaatctctgcatcactcattggaagtgcttctgaagagagctgctctgtgttcagttgactggttttgtgtcctgtttgaacttgctgaatgtaaggcaggctactatgcgttataatctaatcacaatttgtcaatatggtcttggcaatcatctgtgcattactctggtttgcattaagcctgtgtgtgaacttactgtaaaacatgttttatttcaaggttctgcaaaattaattgggcaggttaattgtgtacctgaaacttaacaagcagtttttggaagggc

SEQ ID NO: 64 - DNA, 1178 bp, homo sapien
gcggccgcgggggggcccttgtgggggaaaaggccccggaacgaggccggcccgcgagggcccgcgctcccctcctccccggcggccgcactcacccactccggaatcggccctgtcgcccccgcccgcactccagagccggctgagaacggcagcggcgagggctccacgtgcagcgtctctccgggtaagacctgcagctcccgcgactagaagtgtgaggtcccagggcccttcccgcggaatcggcgctgagaagccccaacccccctcccgcctcccaggcaccttcgggtccaggactacaactcccggcagggtgcgcaaaacgaccgcccaaggcaacggaggctcacgaggtacaaggaagcacaacgccccaatccgctttgttttacacagtctcactttccctgcacctttatacacttcgataaccctaacgaacaggacgctgactcggaggggagcttgaactaggggaaaggccactcaaagagcgcatgcgtacagagcaaggtttcaaggaggggaaaaagaacgggtcaaattaggcgaagaaaagatggcggaggctgtgccaggggacccggaagcacttaccctccacttcctcctcctgtttggcttctgtctcacctagacccgtccggtcgcagactgtctccgagacgcttcctgtccgaatcagcatgattcttcagaggctcttcaggttctcctctgtcattcggtcagccgtctcagtccatttgcggaggaacattggtgttacagcagtggcatttaataaggaacttgatcctatacagaaactctttgtggacaagattagagaatacaaatctaagcgacagacatctggaggacctgttgatgctagttcagagtatcagcaagagctggagagggagctttttaagctcaagcaaatgtttggtaatgcagacatgaatacatttcccaccttcaaatttgaagatcccaaatttgaagtcatcgaaaaaccccaggcctgaagaaataaagtaaaattaatctggtaatttgtcacggattagttgtacaactagttagaagtttcagaataaacatgcatttcataactgtcaaatgttcttttaattctgagtccaaataaattatttggtgatgttgaaaaaaaaaaaaaaaaaaaa

SEQ ID NO: 65 - DNA, 1030 bp, homo sapien
gcctgtgagcagcgagatccagggacagagtctcagcctcgccgctgctgccgccgccgccgcccagagactgctgagcccgtccgtccgccgccaccacccactccggacacagaacatccagtcatggataaaaatgagctggttcagaaggccaaactggccgagcaggctgagcgatatgatgacatggcagcctgcatgaagtctgtaactgagcaaggagctgaattatccaatgaggagaggaatcttctctcagttgcttataaaaatgttgtaggagcccgtaggtcatcttggagggtcgtctcaagtattgaacaaaagacggaaggtgctgagaaaaaacagcagatggctcgagaatacagagagaaaattgagacggagctaagagatatctgcaatgatgtactgtctcttttggaaaagttcttgatccccaatgcttcacaagcagagagcaaagtcttctatttgaaaatgaaaggagattactaccgttacttggctgaggttgccgctggtgatgacaagaaagggattgtcgatcagtcacaacaagcataccaagaagcttttgaaatcagcaaaaaggaaatgcaaccaacacatcctatcagactgggtctggcccttaacttctctgtgttctattatgagattctgaactccccagagaaagcctgctctcttgcaaagacagcttttgatgaagccattgctgaacttgatacattaagtgaagagtcatacaaagacagcacgctaataatgcaattactgagagacaacttgacattgtggacatcggatacccaaggagacgaagctgaagcaggagaaggaggggaaaattaaccggccttccaacttttgtctgcctcattctaaaatttacacagtagaccatttgtcatccatgctgtcccacaaatagttttttgtttacgatttatgacaggtttatgttacttctatttgaatttctatatttcccatgtggtttttatgtttaatattaggg

SEQ ID NO: 66 - DNA, 795 bp, homo sapien
  misc_feature (431)..(431): n is a, c, g, or t
  misc_feature (755)..(755): n is a, c, g, or t
ttttttctaatttccctttaatttgtagatttaaccacagaactgtctcgatttttataaaaattgatcccaagatccaccttctgccgtggctgccacagtccaggctgagcttttcctcctgagccacacacgtgtgttcccgtccagcccaaaggggagaggtgtggggcggtggggcggggaggcgccttgtgctgtggcactggacacggtgctcatctgcaggatagccacgaagacaaacggcacagacgaagacaacacaagacacacgagcctggtcttccatcctcaggactaaaactgcgctgagagcaattcacataatctctgagaaacggcttccttacttgtgcgcagcgtgagccggtacatctgggcttgcaggttcggctccaagcgcagcaggcatccaatctgggtggttntcgtgtggatgattccagctcccacgaaattcgcaggattaggatcaacttcttcaagaagtgcagaaccaaatccaatgatcttggctttggtgacttctgtgtccattgggtgctttgctttgaagatgttctgcacttcctgctgtggattgctcaactgcttccaacgttgaaagaaatcctgagaagccatttctgtcggctggaagaatttgttgagagtgatgggcagctgcacagacacgttctggaaggtgcccccatacctgaactgaatgttgaggactgggcgcctcgtgaagtcggacacgcactctatgntgaccacctgctgcacctgcgcgcccccttcacggtcggg

SEQ ID NO: 67 - DNA, 2240 bp, homo sapien
gagggttcgaagatggcggcgcgcaagggtcggcgtcgcacgtgtgaaaccggggaacccatggaagccgagtccggcgacacaagttccgagggcccggcccaggtctacctgcccggccgggggccgccgctacgcgaaggggaggagctggtcatggacgaggaggcctatgtgctctaccaccgagcgcagactggcgccccctgtctcagctttgacatagtccgggatcacctgggagacaaccggacagagcttcctcttacactttacttgtgtgctgggacccaggctgagagcgcccagagcaacagactgatgatgcttcggatgcacaatctgcatgggacaaagcccccaccctcagagggcagtgatgaagaagaagaggaggaagatgaagaggatgaagaagagcggaaacctcagctggagctggccatggtgccccactatggtggcatcaaccgagttcgggtgtcatggctgggtgaagagcctgtggctggggtgtggtcagagaagggccaggtggaggtgtttgcgctgcggcggcttctgcaggtggtggaggagccccaggccctggcagccttcctccgggatgagcaggcccaaatgaagcccatcttctccttcgctggacacatgggcgagggctttgcccttgactggtccccccgggtgaccggtcgcctgctgaccggtgactgtcaaaagaacatccacctctggacacctacggacggcggctcctggcacgtggaccagcggccattcgtgggccacacacgctctgtggaggacctgcagtggtcaccgactgagaacacggtgtttgcctcctgctcagctgacgcctccatccgcatctgggacatccgggcagcccccagcaaggcctgcatgctcaccacagccaccgcccatgatggggacgtcaatgtcatcagctggagccgccgggagcccttcctgctcagtggcggggatgatggggccctcaagatctgggaccttcggcagttcaagtctggttccccagtggccaccttcaagcagcacgtggcccccgtgacctccgtcgagtggcacccccaggacagcggggtctttgcagcctcgggtgcagaccaccagatcacacagtgggacctggcagtggagcgggaccctgaggcgggcgacgtggaggccgaccccggactggccgacctcccgcagcagctgctgttcgtgcaccagggcgagaccgagctgaaggagctgcactggcacccgcagtgcccagggctcctggtcagcacggcgctgtcaggcttcaccatcttccgcaccatcagcgtctgaggcgtcccactggctctgatcttgcttcctgcttggaaactgaagtcgaattgggctcccctggaaggggttcattcaggtctgttgactgagactggccggcctgtgggctgccgtgatggattctgtttgacgtattgttctctagaaggcctggctctgatccagtgacccctctcaccaaagaactcggtttaaccagggctctgtaagaccactcccacccagagacttgtgtggcctggtgtggcctgtgtgtcggattccttcctgtcagctgtgacccatttgacctgtgtccccagaacccagttttttgtttgtttgtttgagacggagtcttggtctgtcgcccaggctggagtgcagtagcacgatcttggctcactgcaacctccgcctcctgggttaaagtgattctctcagctcagtctcccaggtagctgggattacaggcatgtgccaccacaccccgttaatttttgtatttttagtagagacggggtttcaccatgttggccaggctggtctcaaattcttgatctcaagtgatctgtccgccccggcctcccagagtgctgggttgggattacaggcgtgagccaccgcgtccggctcaggacccagttttggctgctggttcccagcaggggactcgggggatatacagtggctgcaccaaattggaggtgtgggttcctccaacacaatttgcttctgcccgttgtcttcctgccagctgggtttggccaggatttctccgtgtgggggctacatgcgaccctctcccctcctccctgactttagaggctggtgctgtgtcgggaggaaggtcagggctcctgagcagcaataaaggaccaggaagaggcctgaaaaaaaaaaaa

SEQ ID NO: 68 - DNA, 3257 bp, homo sapien
atttccttctccctttccccgccagcttcgcatccatctcccccaccccgtaaccccctcctgcctccatccaccggggctatggccgcagaagaggtattgcagacggtggaccattataagactgagatagagaggctaaccaaggagctcacggagaccacccacgagaagatccaggctgccgagtacgggctggtggtgctggaggagaagctgaccctcaaacagcagtatgatgaactggaggctgagtacgacagcctcaaacaggagctggagcagctcaaagaggcatttgggcagtccttctccatccaccggaaggttgctgaagatggagagactcgggaggaaacgcttctgcaggagtcagcatcgaaggaggcttactatctggggaagatcttggagatgcagaacgagctgaaacagagccgggctgtggtcactaatgtacaggcagaaaacgagaggctcaccgcagtcgtgcaggatctgaaggagaacaatgagatggtggagctacagagaatacggatgaaggatgaaatccgagaatataagttccgggaggcacggctccttcaggactatactgaattggaagaagaaaatatcacattgcagaaactagtgtccacgttgaagcagaaccaggttgaatacgaaggcttaaagcatgagattaagcgatttgaggaggagacggtactgctgaacagccagctggaagatgccatccgattgaaagagattgctgagcaccaactggaagaagccctcgagactttaaaaaatgaaagagagcaaaagaacaacctgcggaaggagctctcccagtatatcagcctcaatgataaccatatcagcatctcagtagatggactcaaatttgccgaggatgggagtgaaccaaacaatgatgacaaaatgaacggtcatatccatgggcctcttgtgaaactgaatggagactatcggactcccaccttaaggaaaggagagtctctgaaccctgtctctgacttattcagtgagctgaacatttcagaaatacagaagttgaagcagcagcttatgcaggtagagcgggaaaaggccattcttttggccaacctacaggagtcacagacacagctggaacacaccaagggggcactgacggagcagcatgagcgggtgcaccggctcacagagcacgtcaatgccatgaggggcctgcaaagcagcaaggagctcaaggctgagctggacggggagaagggccgggactcaggggaggaggcccatgactatgaggtggacatcaatggtttagagatccttgaatgcaaatacagggtggcagtaactgaggtgattgatctgaaagctgaaattaaggccttaaaggagaaatataataaatctgtagaaaactacactgatgagaaggccaagtatgagagtaaaatccagatgtatgatgagcaggtgacaagccttgagaagaccaccaaggagagtggtgagaagatggcccacatggagaaggagttgcaaaagatgaccagcatagccaacgaaaatcacagtacccttaatacggcccaggatgagttagtgacattcagtgaggagttagctcagctttaccaccatgtgtgtctatgtaataatgaaactcccaacagggtcatgctggattactataggcagagcagagtcacccgcagtggcagcctgaaagggcccgatgatcccagaggacttttgtccccacgattagccaggcggggtgtgtcatccccggtagaaacaaggacctcatctgaaccagttgcaaaagaaagcacagagcccagcaaagaaccaagtccaactaagacccccacaatctctcctgttattactgccccaccgtcatctccagtattggatacaagtgacatccgcaaagagccaatgaatatctacaaccttaatgccataatccgggaccaaatcaagcatctgcagaaagctgtggaccggtccttgcaactgtctcgtcaaagagcagcagctcgggagctagcccccatgattgataaagacaaggaagccttaatggaagagatcctcaagctaaagtccctgctgagcaccaaacgggagcagatcgccacattgagggcggtgttgaaagccaacaagcagacagctgaggtggcgctagctaatctcaagaacaaatatgaaaatgaaaaagcaatggtgactgaaaccatgacgaagcttagaaatgaactgaaggctttgaaagaagatgctgcaaccttctcatccctgagaacaatgtttgcaacaagatgtgatgaatatgtcacccagttggatgagatgcagagacagttagcagctgcagaggatgagaagaagactctgaacactttgttacgaatggctatccagcaaaaactcgccctgacccagaggctggaggacttagagtttgaccatgagcagtcccgacgcagcaaaggcaaacttggaaagagcaagatcggcagccctaaagtaagtggggaggcatcagtcaccgtgcccaccatagacacttacctcctgcatagtcagggcccacagacacccaacattcgggtcagcagtggcactcagaggaaaagacaattttcaccttccctttgtgatcagagccgtcccaggacttcaggggcttcctacctacagaatttattaagagttccccctgatcccacctccacagaatcatttcttctgaagggccccccttccatgagtgaattcatccaagggcaccggctcagcaaggaaaaaaggttaaccgtggctccaccagattgtcagcagcctgctgcctccgtaccgccacagtgctcacaactagccgggaggcaagactgcccaactgtcagtcctgacacagctctccctgaggagcagccacattccagctcccagtgcgcccctctccactgtctctccaagcctcctcacccctagtcttcatctcctgtggacgaacatctggggtggaagttttgtagccacacacaggatactgcccaagatccagcgggtgttttcttctcggttgttagatgtacaattggattaatgtccatcgttttggaagacgagaaagttgagaagaacacgaagcacagaccctgatgtgataaaacattttgtggtttctctgagtcacagataaacttctgccatcaaatggctacagttcatttaaattt

SEQ ID NO: 69 - DNA, 126679 bp, homo sapien
gatccgcctgcctcggcctcccaaagtgctgggattataggcatgagccaccgcacctggccttatttttctttttgagatggagtctgactttgtcgcctgagctggagtgcagtggcgcgatctgggctcactgcagcctctgcctcccgggttcaagcaattctacctcagcctcctgaacagctgagattagagatgcgtgccaccatgcccagctaatttttgtatttttagtagatgcaggatttcagcatgttggctaggctggtctcaaactcctgacctcaagtgatccacccacctcggcctcccaaagtgctgggattacaggcatgagccaccgctcctggctattttcttttgagactgggtctcattctgttcccaggctggagtgcagtggcacaatctcagctcactggaaactccaccttctgggctcaagcagtcctcccacctcagcctgctaagtagctgggattataggcatgtgccaccctgcctggctactttttgtggagatgggattttgcatgttgcctaggctgggcttgaattcctaagctagaacaatctgctcagggatgttgtatatttctaaaggtatttttccttttgttgcaggtgacacaactaaaaaaaaacaaaggtatttatggaattccactgagtggtaatggatgatgcagttcaaataactaaggtaagagaaataaaaccagaactgtgaggaggcttttgccagccaagtagtgtccttaaataaagctaacatcacatgctttcctgcttcatttcgtttctaagctgtaagagtagcttatttttttattattataaacattgtaattatcctttaagatacttcttaacctgattatgaatcagaatcacttgaagagctttttttttttaaaaaaaaagaccaaagtcaggctgggcatggtggatcacgcctgtaatcccagcactttgggaggccgaggcgggcagatcacttgaggtcaggagttcaagaccagcctggccaacatggtgaaaccccatctctaccaaaaatacaaaaattagccagatgtggtggcatgtgcctgtaatcccagctactcgggaggctgaagcaggaggatcccttgaacccaggagacagaggttgcagtgagctgagatcgcacactgcattccattctgggcaccaaagaatgaaactccttctcaaaaaaataaaaataaaaagaccaaagttaatgccctgccagcattgaattaaagcttcttgagtagatcacagatgatctccaagttttttaagtgggaatgtaaaccaactctatagttttagaaaactctttggcaatatctgcaaaacatacacgtatctaataacccaggaatttcaattctaggtatccacctttgagaaatgaaaaatatatgtctacacaaaagtgcacatacaaatgttcactgcagctttatgtattatagccagaaaaactgtaacccaatcaggtgtccaaaaacaggagaatagttaaacaaattgtgatatatggtcaggtgtggtggcttacacctgtaatctaagcacttgggaggctaaggcgggcagatcagttgaccagcctggtcaacatggtgaaaccccatctctactaaaattacaaaaatgagctgagtgtggtggctcacgcctgtaatcccagctactcaggaggctaagacaggagaatggcttgaagccaggaggcagaagttgcagtgaggtgagatcacgcccctgcactccatccaatctgggcaacagggcgagactatgtatcaacaacaacaaaaaattgacatacactattgataacatggaattttattcagtaatagaaaggaacaaactaccagtagacatgacaacatggatgaatctcgtagataaaaggttgagtgaaagaaaccagatggacaagaaaaagtagatgtagcagaattaccgagtaaaactaaactacagtgataaaggtcatatccctacttcctctgacaggaggtgggaggttgtgactggaaagaggtatgagagagcctctgcagcaccgaaaaggtgttttgttttgttttttgagactgagtcttgctatgtcaccaggctggagtgcagtggtgtgatctcagctcactgcaacctccgcttcctgggttcaagcaattctcctgcctcagcttcccaagtagctgggattacagacacgcgccaccacgcccagctaatttttgtatttttaatagagacagagtttcaccatgttggccaggatggtctcgattgcccaacctcatgatccgcctgcctctgcctcccaaagtgctgggattacaggcatgagccaccgcgcccggcctgaaaaggttttacatcttaatgtgttcatatacatacttttctcatggtaaaatatatataagattaaatttatcattttaactacttttaaagtatacaattcattggcattaagtacattcctgttgtgcagccatcaccactgtccatctccaaaactttttcatctccccaaactgaaactccatatccattaaacactaactccccatttcctcctcccccagctgctggcaaccattctaccttctgtctctatgaatttgactataatagttacctcgtataagtggaatcatatttgtcatttgacatctggtttgtttcacataggtttatttcacaaaggtatcttgtttatttcacataggatgaccttgttttcaagtcatccatgttgtagcatatatcagaatttacattttatggttgaataatattctgttgtatgtttataccactttatgtgtatccattcattcactgatggacacttgggctgcttccaccttttggctgttgtgactaatggtgctatgaacatgggtgtaggctgagtgtggtggctcacgcctgtaatcccagcactttgggaggccgaggcaggcggatcacttgaggtcaggagttcaagaccagcttggacaacatggcaaaaccccatttctaccaaaaatgcaaaaattagccaggcatggtgctgcatgcctgtaattcccagctacttgggaggctgaggcaggagaatcgcttgaacctaggaggtagaggttgcagtgagcccagatggtgctactgcactccagcctgggtgacagagtgaggctgtctcaattgaaaaaacaaaaacaaaaacaaaaaaaaacacatggatgtacaaacatctgttcgagtccctgcttttagttcttttgagtatattcttagaagtaaaattactggatcatatggtaactccatgtttcattttttgaggaatcaccatgctgtttttcacagtactgcatcattttatattcccaccagcaatgcacaagggcttcaatttctttacattctgctttttggtgacctccataattctaaattatatgtatatgctgtttcttcttaattcttttattaataaaaaagacaacataattctttgcctctccagtgtgaaaaaatgggaatttaccttacactatccccccatttaatatttgtattatttcctgttctgctgctgtttattagtttcctcagacttctgtaacaaaactccatgaactgggtggcttaaacaatagaaatttattgtctcagagttttggaggctagaagtcttgcgggctgtgcgggagaatctgttctatgattttcttctagcttctggtagcctcaggcatcccttacattgtagatggcattctctctgtatcttcagattgtcttccctctatgcatatctgtctcttgtgtccaaatttcctttttcaaaataagtgcgctagtcattggattagggaccaccctaatgagctcatctcaacttgatcatatgcaaaaatcctctttctaaataagttcacattcacaggaactgagtagggggttacaattttaacatcttttaggggacacaattcagtctgggtgacagaacaaatctctgtctcaaaaacaaaacaaaacaaacccataaagtgattacatttctaactttcggaagtactcttcaacctcctttttttaggttaattttcagcactctttccttctttcttcctttcctttttccttttccttttttttttttttttttttttttactttttatttttttgagacagagtcttggtctgtcgctcaggctggagtacagtggtgtgatcttggctcactgcaacctctgcctcctaggctgaagtgattttcctgcctcagcctcccaagtagctgggattacaggcacccgccaccacgcccggctaatttttgtatttttagtagagccaggttttcaccttgttggccaagctggtctcaaacttctggcctcaagtgatccgcccgcctcggcctcccaaagtgctgggattacaggcatatgccaccacacctggctaatttttgtatttttagtagagacagggtttcacctgttggatctcctgacctcatgatcgccctcctcagcctcccaaagtgctgggattacagtcgtgagtgccgcgcccacttaatatttatgttattatagctaagtaaatattgttcactgtcaggccaggcagcattttctgggtttttatttctttctctgtaggttcaatgtcatagaccctgggctattcaaatgagaaaatgaagaaaaagtgaattctctctctgaaactatcagttgcttccaatcatgtctttatattttatatttgaaccgtaactttctcataaaattttctccctggagtttctaattttcttgtctatttgcctgttattatagtttcacttttcaccaagatctcaatcatacactccagcctgtcaaggctagttcaaaccatacactgtggcccaaatttaggctagtcgtacactccaatccgagaccagtgggcactgttttttaggctgtctacacagtcatattggtattttccttactggtttttctttgacgggggtgcaggggaggttgggtccactgatcttggatatcagtctttctttgtatttgttttttaaatcttactagaggctagggggcatggtggctcatgcctgtaaccccagcactttgggaggctgaggcaggtggatcacttgaggccaggagttcaagaccagcctggccaacacggcaaaaccctgtctctactaaaaatacaaaaattagccaggcgtggtggtgggtgcctgtaatcctagctagtcgggaggctgaggcaggagaattgcttgaacccgggtggtggaggttgcagtgagccaagatcataccattgcactgcagcctaggcgacagagtgagactccatctcagtcaatcaatcagtcaatcaatctatcttaccagagttcattctcaagtcacttactgagagaaaaggtacctggcagataaattttgactctttctggtatccgttttttgttgttgttgttgttgttgtttgtttgttttggagacggagtctcgctctgttgcccaggctggagtgcagtggcgcgatcttggctcactgcaagcttcgcctcccaggttcatgccattctcctgcctcagcctcctaagtagctgggactataggcgcctgtcaccacgcctggctaattttttgtatttttagtagagatggagtttcactgtgttagctgatctgccctccttggcctcccaaagtgctgggattacaggcgtgagccaccgtacccagcctctggtgtctgtttttaagaccctcatgttggagtgatggtttggttgactatagaattctaggttgcctattatttttcctcaaaactttgaagtcattgctccatttcttctgacatcccttgttgttcatgagaaatagaaagtttcatataggaaattaatttttcttcttttctggaagcttttatgttctatatagtctggaattccatagaggtgtacttggtgggccccttaatagatctgcagactcatagctctccattttttggttcttttctgtcagcagctttctgatattgagcttcctgggttgttcatataatgttcttatctattctgtcctttttaaaaactctttgcttttggttgttttcctggagattgtcataactttatctcctaatctttttttctctctttttttttttttttttgagacagggtctcaccctgtggcccagactggagttcagtggtgccatcacagctcactgcagcctcgagctcccaggttcaagcaatcctcccacctcagctttccaagtagctggaactataggcatgcgctactacacccagctaattttttttatttttagtagtgacagggtctcactgtgttgccctggctggtctcaaactcctgagctcaagtgatccttctgcctctggggactacaggagtatgccaccacacctggctaatttttgtattttttagtagagacagggtttcaccatgttgccaggctggtcttgaactcctaggctcaagcgatccacctgcctcagcctcccaaagtgctgggattacaggtgtgagccaccacacctggcctgctgttttttcttttactgtttcttaaactagtcttctccccgctttcttttcctgtatgaacgttaatagttgaccacagcattggccctgtaatactcttttgttctttgtatttcttcagttttatttagcctctgttgtgtgttcacacattcctttttatttgcttgatgtgtgtcccatcccttcttttgaacactgtgtggtcattaatgagagtgtggtaggattttatgtactgatatttaagaaaatgaccataaaatgttcttggagatggtctttaaagaccgggcatggtagctcatgtttgtaatcttagtactttgggtggctgaggcaggaggattgcttgagctcaggagtttgagaccagcctgggaaacatggggagatcccatctctacaaaaaatgcacaaattacccaggcgtggtagtacatgcccgtggtcccagctattccagagcctgaagtgggaggattgcttgagcccaggagctcgaggctgcagtaagccatgtttgcaccactgcactccagcctgagtaacagaacaagaccctgtctcaaagaaaggaaaaaaaaattttaagtagttgattaaaagaggtctttagggtgggctctaatttgatgtgactggtgtccttgtaagaaaaggaaatttgtacacgcagacatcagaaacaaatacacagaggaatgaccaggtgaggatacagtaagatggtggccatctgcaggccaaggagagaggtctcataggaaaccaaacttgctgacactttcatcttggacttctagcctgtacagctgtgagaaaataaatttctgttgttgaacccaccgagtctgtgatacttttatggcagccctaccaaatgaatatagacatttaagaaggcttggtgcattgcagcatttggtaaattattatgcatttcgttgtattgtgcatgtagtgccattactgagaatagcaggatggatgggaagcatcgagacaaagtaaaatacgagctggccactaacatatggtatgattttgtggtaggtgaaaaaaggattccagaagtagagtgcttatgaaagaaaagctcagtagtgtaagaattttacaccagtttgactttaacagagagtgagttcaacagtgaaagatgaggttgcaaatgtagtttggggacccatattaatttcctggtgctgcccaaacaaagtaccataaactcggtggctaaagacagcagaaatatattgtctggcagttctggaggcccaaagtcaaggtgttggcagtgttggttccttcttggggggaatctgtcccatgcatctctccttagcttccaagagccccctgtgttatttggattgtaaatgatcactcaaatcctctttcttcaattggcattttccctgtctgttttcacatgattatcttcttataaggacaccagtcatattggattaggggcccacagtactccagaatgacctcatctttatttaactaattacatcttcaacgaccctatttccaaataaggtcacatcctatggtactggggattaggacttcatatcttttttggggaggcatagttcaacccataacaggggccaaactgtgaagcatttcctatatatcaatccagatattttcaaatctattgtttattcagtgggaaaccattgaaaactttgagcaggatgaatctaacactttaggaagactccttggggatggggttggagagatgttagctgcactggaagtcagtagaccagagtctggaccactgggagtctggaccagatcaatgttatggaaaaccaggattctggggctcccactcaagatatcccaaacccaaatcttcagactggagacccaggactgttttttaaaagctccctctctctccctgtgagtcagatgatttagcctagcttggatgtaacactgggtgtgaggtgatagaggcatgaaatgggttggtggttatgcaagtagaaagaccagagagaacctgggaaaagagacatttcgaaaaagtagtatgtaaactggcaccggagagtctgagacagtggtggaatccttaacagaaataaagatgtctagagaataaattgggtttaaagggaaggtaattaatttggtttacagtgtaaggtgatagacagtcagcaggcacttggagaatggtgatgtatgttcagaagtgagataatggaggtgataatcaaaaccctttgttttgatttgagcctttgtgtgggagaaaggatatggcgagaagaacagaagatcaggaagccaatactgtagaccctcattccctagcccctgaaacaaatggatttgacttctctgtcatgacacctggaacaaatgtggcattgcttacttacttcctttgccatgaactcagtgaaggcagggacgggtcttggcttgtgtgtgtgtgtgtgtgtgtgtgtgtgtaagagactgggtctcattctgttacccaggcatgagtgccatggcataatcatagctcactgcagcctcaaacgaacctcctccctcaggcctcctgagttgctgggactacaggcatgcaccaatggccctggctttttaaaggccatcatctagcacagtgcctggcttttcaatggaagtctgttgaatgactgactgactgaccgacttggaaaatgaacacatcaacttgagaataagaactttaacttttttcttccttgcatcccctaacatttaatccaatgcctggtccttaataggacccaaataaaattttgatgtgtgaatggtagaagaaaagctaaaattgagtagtcattgtgtcaaagagaaccaggaaacagagaagcttttgagaataagttgaccataacatgtcaaatgcaagtcaaggagaatgaaaactgagggcaggaattagatttaatcaggaggttatttgtagatttgagaacgaaggatttaagaacataatgaggttgttaagggagaatgaaggaattaagatcataatgaggttgttaagtagaggtggaaagtgaggaaatgaaagccaagtacatcttatacaagtttagtagtaatgaggaaaagagaagctcatagagttaaagctctaaaaatctgtttagaacatccgtgtctatttgtaaacaaaggggtatgagggttagggatggaaaaatggaaagtaccagaaggaaatgcataattttaggggaaagatctcaaatgggatcaagaacatgggcagtagccttaaaaaggatgagggaatctcttcctctagtctaaaaagggagaatagaggctctatagaggagagagaggtcatgtcctcttgtcagccatctgctcagagggagcttgggctgctgtgctagaaactgacataggaaactgacaaaggaaggatatgttttctgcacagcactgaggagtgtgatactcctaagcagtagttggcagcctgagataggaatggtggaaccagatggtaagtataatccaggaatcaggatggcactttctgtagattagggagttgtaggctgggggtgtacttttattcactcttctctgattcagaggttttataattttcactaacatcattaaaaacaatattggatgcctactacctgttggtttttattttaatcttgggaaaaaaaagtaaaagctactatcctgaggtttctggttttattggggagatagatcatatatgtaaaaagcaagtttagcaaatggcacatggcattatagactaagtcccaaatcagtagattacataaatgtcagagagattacaattatagcagtacactttgaggttcttttccccttagcttatgaacatttaaattttgtcacttttataaatacatgcctatttgagaggtaagaaaagtaccatgttgctttaatttgcttttctttgttagcaaagatgaattttttcagttgtttatcattattttactttttatgaattgcctattcatagcttttatccatctttccatggttgtgtttgtacttactaatttgtaaatacctcatttaataaggttatttaaccttttgcctgtaacattttgcaaatgttttttctagcttgttttttggggttctttcttttggttggttggttggttggttggttggttgggttttttttttgagacagatcatcactctgttacccaggctggaatgcagtggtgccatctctgctcactgcaacctccaccttctggggtcaaatgattcttgtgtctcagcctcccaagtagctgggattacaggcgcacgccaccacgcccagctaatttttataatttttgtagagatggggtttcacgatgttggctagggtggtctcaaaactcctgacctcaagtgatttgcctccctcagcctcccaaagtgctgggattacagatgcagccaccatggccagccttttctagtttttttaatttaaacattttctttcagatttcttattttgatttattttcagtttatgatgttttgttgacacataagagtttaaatatcttatgtattagaaactattaaatatttctttttaatatttaggaaggctacctcagcctgagaacagacaaatattttcaaatgttttcttcaaattgttttatagtttattggtacttatttacattccattgtattattgttatttatatacttaaaactttaaaccattttggaatattgcatgaaatagagacctaatttttgctgagtagttcagcagtttctagtactgtttactaaataatctatgaaaattttctgcggattcctaaatgattttgtccaggctggagtacagtggcacaatcatggctcactgcggcatctacctccccaggctcaggtgattgtcccacctcagcctctcaagtagctgggactacagaagtgccactacacccagctaatttttgcatttttttgtagagactatatttcaccatgttgctgagcctggtcttgaactcctgggctcaagcgacctgcccacttcggcctcccaaagtactaggattacaaggcatgagccaccgggtattttttatcatattcccaatacttatgtatacagacttccttgtttataaatctgtatctgtaccattgccacatattattgtattaatataatctcatagtgcaaatacttgttcattatttgttttaaataatgcctagactacactcacctatttgtatatgtgaactttttttaaaacattttattttttaataatttaagactcagaaagctgcagtagtacaggttcccaggtatgcttcacccaagggctttcaattagaacctttttttttttttttttttttgagatggagtctcgctctgtcaccaggctggagtgcagtggcgccatctcagcacactgcaacctctgactccctgattcgagcaattctcctgtctcagcctcccgagtagctggaattacaggcatacgccaccacacccagctaatttttgtatttttagtcaagacggtgtttcgccatgttggtcaggctgatctcaaactcctgacctcaggtgatctgcttgccttagcctcccaaagtgctgggattagagtggtgagccactgtgcccggcccctgaaatcaccttttctgtaatgctactttgttcaataaaaataacatattaatatcctttttaaaaatacatacaatatattgttattaactgtagtcaccatgatgtacaatagatctcttgaacttattcctcctaactgaattttgtgtcctttgttcagtatttccccaattcccctacccaccaacctctagtaaccaccattttactctctatttctatgaattcaactttttacattccacgtgtaagtgagatcatgtgatatttgtctttctatgtctggcttatttcgtttaacataatgtcctccaggtttatccatgttatcacaaatgacagaatttattctttttttaaggctgaatagtgttccattgtgtatgtatgccacattttctttcaccattcatccatcaatgaatgaaaacacttaggttgatttcatatcttagctattgtgaataatgctgcaatgaacatagtagtacagatatctcttcaacatacccatattagttatatcctttagatatatatccaatagggggaattactgaatcatatagtagttctatttaaatttttttttgttttttaattttgtttgtttagagacagggtctcgctgtgtctccaaggctgtagcacagttctgcaatcataactcactgtaagctcaagtgatctacttcagcttcgctactacaggcacatgccactatagtcagctaatttttaaaaattgtttgtagagtccaggtgtggtggctcacgcctgtaatcccagcaatttgggaggcctaggcgggtggatcacctgaagtcaggagtttgacactagcctgactgccatggtaaaaccccatctctactaaaaatacaaaaaaattagccgggcgtggctgtgcatgcctatgatcccagctacttgggaggctgagaggcaggagaatcacttgaacccgggaggcagaggttgcagtaagccaagatctcgccattgcactccagcctgggcgacaagagtgaaaatccaactcaaaaaaaaaaaaaatcgtttgtagagacagggtctcacaatattgaccagtctggtctcaaactcctggcttcaggcagtcttcctgtcttggcctcccaaagtgctgacattatagccatgagcccctgcacccagccttatttttaattttttgaggaacctccatacatgttttccataatggctgtacttatttaccttctcaccttattgtataatggtgcatatctcagaatgtgtccttactgagtgacacataactatatttgaagtaagtttcttatagatagcatatagttgggtcttttcttttctttttttaatagagacagggtcttgctatgttgcccaggctggttttgaactcctgggctcaagcagtatgcctgcctgggcctcccaaagtgttggtattataggcatgagccaccatgcctggcctaggtcttttttttttgagacagggtctcacttttgtcacccaagctggagtgccgtggtgcaatcatggctcactgcagcctcaacctcctaggctcaatcagccctccacctcagcctcctgagtagctgggattacagatgcatgccatcatgcctggctaatttttgttttgtttggggtttttttggtagagacagggttttgccatgttgcccaggctggtctcgaagtcttgggctgaagtgatccacctaccttggtctcccaaagtgctgggattacaagcgtaaaccattacacgtggtctagttgggttcttttttaaaagaatcagttctactaatttcttttcgttggtatgtataaaccatttatatttaatataattattgatactttggatttaaatttgccatttttgtttcattcattatttttgttcttctgtttcccctttcctgttttacagtgggttccttgaacattttttaatatttcattttgagtgtatctctttataaagttttttgtgtgattgctctaggaatatatatgtagataacttattacagtctattaatatcaactttttaccaccttaagtagaatgtagttagttttagtagaaggaatcttttagttccttctacctttcttcttctttttttttttttttgagacggagtcttgctctgtcatcaggttggagtgcagtggcgtgatctcagctcattgcaatctccacctcccgggttcaagccattctcctgcctcagcccctccgagtagctgggattacaggtgcatgccaccacacccagctaatttttgtatttttagtagagatgaggtttcaccatgttggccaggatggtctcgatttcctgacctcgtgatctgccggcctcagcctcccaaagtgctgggattacaggcatgagccattgtgcctggcacaccttccttctttatggtacagttgtcttaaatattacctctacatacaaggagaaccacttcagggactgctataatttttactttcaaccatcaaacataatctttaaaactcaagagaagaattgcttaattagtgtatgtatgtgtgtctgtatatgaataaacatatatatatgcataacatatatatggatatatgcatatatagacacacacacaccctttccattgctttttctttacttctatttgaggttttcttctgttatcatttacttcctttctgatagagtttctttagccattcttttcaaagctgatctgttggtgacacatttttagttttgttcatctgccagtatttgtatttcatttttatttctgaaggatattttcactgtctatagaattttagcttgatagttattttctttcagcatttgaaaaatattgtatccatccttgtggtttccatggttcctgatgaaaaatctgttgtctttcaaattgttattctcctatgagtgatatgttgtttctctctaattgatttcaggacttttctttagtttttagaagtttgattctgtaagtttatatctaaatctgaggctgagtgtggtggctcatgcccataatcccaacactttgagaggccaaggtaagaggatttcgtgagtccaggagtttgagaccagcctggacaacatagtgagaccccacctctaaaacagatagatagatagttgattttgtttttgttttttcctttttttgagacggagtcttgctgtgtcacccaggctggagggcagtggctcgatcttggttcactacaacctccgcctcctgggttcaagcaattctcctgcgtcagccacccaagtagctgggattacaggcacccgccaccacacccaactcattttttgtatttttagtacagatggggtttcaccatgttggccaagctggtctcgaactcctgacctcaggtgatccccctgcctcagcctcccaaaatgctgggattacagatgcgagccaccgtacccagtagacagtttttagccattatttcttaaatttttttttttcatctctccattcattctcttactcttgggaccctgatagcatgaatgttagatctttgttattatcccacaggactttgaaactgtgttcatttcttttcaatctactttctctcttgtacagactggatgatttccattcatttaagtttactaattgtttcctttatcatttttcttttgctgttgagcccatccagtgggtctttttaatttcagaaattttatttttaaaaattccatttggtactccttatgtcttctatatgctgagtgtttataatgtcttgtttgagcagtttcatgagcgctgttttaaattcttttcaaataattccaaaatctatattatcttggtattgtcatctgttgattgccttttttcattcaagttgagattttcatgttcctggtataatgagtaatgttggattgcatcctagcacttggaatattgtgctatgagattctggttcctgtttaaatttttatatttaacagtcaacctgtttaggtttagaacacataccctgtcccacttttgtcgactgtggttcagttttcagtcttgttttactcttatggtctgtgctaccgaaaggccagtctgaaatttaggtgttattccggagcagtgttcagttcttatgccttttgctgtgttgtttctggtcatttttacacatgggttgctcagaggcacttttaggatttcatacacagattcagagaattcatttctctagctctctcctcaccataatcctttcccaattctgtagttttgctgggattaggactccatctggttattccagggtagagaaagatgagttcacccacattctctgcagctgtaacatggagaagaggggaaaggcgtgccacctcattatggcagagttgtgttggaaggcagaatgctgttcacaatttctgggccacagtgtctggtgaggaaaaggaggggtacctcctccccttttttagtttgcctggtcaaaatgtttttgtctgctgagctgcccctttcccagttctttacctagagagggcaggcttttcttggcactttcttgtctgtgcttactggatctttcagattgtggcttcagagcttgggctaggacatattagaagttaaaccaaaccaaacaaaaaagtagggagcttcctgttgggtcagtcctcatgtcccctggtccctagccaatctaccttcttttttctacttttcagaatttttctgtcacttgtgtcatgaatttcatctagaatgttcggttataatcggtgggaagggctgggcgcggtggctgacgcctacaatcccagcactttgggaggccaaggcgagcggatcacctgaggtgaggagttcgagaccagcctggccaacatggtgaaaccccgtctctactaaaaatacaaaaaaaattagccgggcatggtgggggacgcctgtaatcccagctacttgggaggctcagataggagaatcgtttgaacccaggaggtggaggttgcagtgagctgagatcgcgccactgcgctccagcctgggcaagaagagcaaaactccatctcaaacaaaaacaaaaacaaaaacaaatcagtgggaggaatagggtggaatatgcttactccatcttttcctgaactgtaaatccctgctgcaattttaaattatgaactttagttccagtagttttttttaacctatgtacgtagtctttcaaatacaaataacagttaaggggttttcccccaataattatatcttgttttcttttcttttcttttttttttttttaaagagaccgggtctcgctgtatcgcctaggctggacttgaactcctgtgctcaggcaatcctcctccctcagccttccaagtatctgggactacaggcatatacccccatacctagctgttttcttatcccattatctacttttagaacaaggattggcaaactataatctgtttcccatatccagctcactgcttattttggtatggcagacaagctcagaataggttttccttttttttggagacaggtctcactttgtcactgaggctggagtgcattggtgtaaacacagctcacttcagcctcgacctcccaggctcatgggatcctcctgtctcagagagaaaaagagagagagaaaaaaagaaattatatgaaattcaaatttcagcgttttattagaatatgccatgttcatttgtttatatattgtctgtggctgccttcatggtacgacagcagagttgagtagttgaagcagagacttaattgccagccctttttccagatgatttgtaaatcctagaagtgaaaccattgtccctttcttgtcctgctttagtgatactgatatttcaagatacataattttcttgggtgaaagtttcttttgtttctggtttctaggtatttgtgagatatttctctcacaaaacgtgttcttttcttctggtttttttttgggggttttttttgtttctttggttttttgagacagtctcgctctgtcacccaggctggagttcagtggcgcgatctcaactcactgcaacctctgcctcctgggttcaagcagttctcctgcctcggcctccctagtagctgggattacaggtgcctgcaatcacgccaggctaatttttgtatttttagtagagatggggtttcaccatgttggccaggctggtcttgaactcctgacctcaggtgatctgccctccttggcctcccaaagtgctgggattacaggcatgagccactacgccttgtctcttttcctctgttatctgacttactggatggcatctgttaggtaaatcagaaaccaaagaggagtagcattcagcactccctgtcaccccaagagcaaatctattatcacaccctgtgcagtttacttcctgaatatctccttccttgtaacacttttgtgtctccaccagtaacttctaactggactgtccacatccagtgctatattctctacacccagctaaatgaagtgttcattccaaaatgcagggcagggaggtcactgtcatgcttctgttcttcaaaggcttcttaatgcttatgggacaaagaaaaatcacccttgtgtggccctaccctgtatacatctccagcttcctggcacctgctcccccttactctttatacttcagacacggtggcttctttcagaccctgctcctgccctttctgaggttacggactggcatggagttccctgccctccttaatgcctccctgattcctgttcatcttctacttgtcagctcaggaatcagtgccttagggaggccttggctgagctccctgactaggtcaaattttcttcttctataggctcttagagtcctataattctcttttccatcacttctcctatttgtctgtgaggtgatttgtttaatgtcagttttctgctactagactgtaagcttcatgaagatagggattctgttagaatttgttcactatttctagtagaaggaacagggcctagcacatagtaaatactgagtaagcgggttatttccccaatgattgcctttttaaagaaaaccagttctgtaaaccagcattcatcaggcttatcatatggctttttatattttgaattatttttgtgaggatttttattaatatgttttccaataatggaccatggttaaatttttgaagtaagccttacttgatcaggttgtggtataattataacatatgctgctttttctttgctaggattttaagattttgcagttaaagttattttcttttttgtgtgctttgtcagattttgacatcagtgttatactagtattttcatggcttattttattccattcttttattttcaacttttctatatccttaagcttaaaaatgtctcttttaaacagcatataattgagggcttttattattaggctttataatttttgtattttaattggaacatttagtttgtttaatatagttaatatattctttgctttctattttcctcaaagatttgaatagaacaaaaggctgacctcccccaagcaagagggaattctctggcagtctgcctttgcacttgaaatgcaactcctccctgaatctccagcctgccagcctcttctattatgagtcaattccttaaaataattctatatgatatatatttaatataattaatatataatgtggctactacctagtagaattaatgtatacttaatatgacatataatataattacagtagtaccttcttatctgggggaagcattatattccaagacccccagtggatgcctaaaaccacagatatatattttcctatacatacatagctgtgataaagtttaatttataaattaggcacagtaaaaaattaacaataactaataataaaatacaatacttataataatatgccagcatgttcctttttctcttttttcttgctttttggattgatagacttttttactatcctagcttttttccctcttgccaagttatagaccctgttcttttagtggttaccctacagattacaacacatagcctgcatgtataggaatgaaatacagtttacgtagggttcagtaccatctgtggtttcaggcatctactgggagtcttggaacatatccccccaccccccccccagataagggggtagtactgaaattatattaaatatatgcttattatattaaatattagtcatatattacatacatattatatagatttattttaagggattgattcacagtgggggaggctagcaggctggagacccaggaaggaactgcacttcaagttcaagggtagtctgctggagaattccctcttgcgtggggaaggtcagccttttgtgctattcagaccttcagttgtatggatgaagcccacctacattatggagggcaaccttctgtactcaagagtccattgatttaaatgtaaatctcatccaaaaaaacccctcacagaaatatccagaataacctttaaccaaatatctggacactgtggtgtggcccaaccaaattaacaatcacaagtctactctttatcaacttggcacccatacacatctccttaaaccattattaatctccaaataaagacagtaacaaagtcatacttctgcttagcatgaaagaactatcttgcatgtagccgaaaacacactattcctttctctaaaagaggatgcagattatttggttgatgtttactcttcttgatatcctgcaacttaaattctaaagtttaagaaaaagttaatacttaagtattatgatcagctgttaatctaattttttttgacgaaaatattttcgtatccattttctattgctgcctagcaaaacatccccaaatttaatattttaaagcaacaaccatcaaaaattggctcacaattctgtgaatatcaatcaatgctgggtagctgtttggttcctctactggtcttttttttttttttttttttagacagggtctcactctgccacccaggctggagtgcagtggcatgatctcggctcactgtaacctccgcctcccaggctcaagcaattgtcctgtctcaaccttctgagtagctgggattacagacacacaccactaccacctggctaatttttttatttttagtagatatagggtttcaccatgttggccaggctggtctcgaactcctcacctcaaatgatccacctgcctcggcctcccaaagtgctgggattacaggcgtgagccaccatgcctggcccctctgctggtcttgattgaagtcattcatgcaactgtaatcatctaatggttcatctgggactgagattgtctcaagcacatgtctggcagttggtgtcacttgttgattgggcctctctcttaacgtaaggaagtgagccaaagcttctcacattatgacagcagtgttcccatagagccaaatgacagctgtaagttctcttgaggtatcaacttggaagacacaccattacttctgcattttattggtttaagcaagtcacagggccaactcaaattaaaggaatggagaaataaacttcacctgttgataggagtggcagtgtctcactgtaaaaggcatgtgtacaaggatgggattttacgtagccatctttgcaaacagtctaccacagtgtcttttttcctttcgagtgcttaaaaaaattgtttttaaataattatttggttttcagaaatttcactattgtgtatctagacacagatttcctttttatttatctgtttggggggtgtttagggcttcttggatctgtggtttgatgtttttcctcagttttggagaattttcagccttcgtctgttcttcgaatatttcttctgttccatttctccctttccgcttttctgaaactgaaattacatgtaggttagatcatttcattgtatcctttatacctcttaccttctctttggtatttttttataaatctttttgcttctctctgcttcattctagatacttccttttgacctatttaccagctcactaattctctcttcaggtatattttacctgttcttaaatttatccattaagatctttttttcagatctgctattacatttttataccattcttgactaaaattcttaatgctacaggactgttcttcttgtctgtttcttactgattctcatgttgcctttttatggactagacactgtagttttaaaattatttatagaaatgacctgagacctatgatatatttttcaagagaggatttacgtttgtttctagctttgcctaggagtcttcaatcattttaattcagtttcagggactgatttgcttttaagcagggctgtagtccctacaggggtggtcaacttcatttcactacctaatatacctattatgtgtggagtactttgctagatgttgggtaggtcttgtgagcagagcagacctctctttggtctgtatggagcacggagcttgattataattggcaggtgtgtgtgtgtgtgtgtgtgtgtgtgtgtaaataaataaatatttatttatttatttattataggccgggtacagtggcttacacctgtaatcccagcactttatgaagtcaaggcaggtggatcacttgaggtcaggagtttgaggccagccttgccaacatggtgaaaccctgtctcttctgaaaatacaaaaattagccagacgtggtggcaggtgcctgtaatcccagctactcgagaggctgcggcatgacagtcactcaagcccgggaggtagaggttgcagtgagctgagattgtgccactgtaatccagcctgggtgacagagtgagactccatctcaatatatatatgcgtgtgtgtatatatatatatctatatctttaagatagatatatttatatagctaagtaattaataaatatattaagttctatgaaagcaatgagtaggctgctatggttgtgaatatttggactacacaggggataagaatgggtctaccataattagcagggacaggttttgtttaagccaaaaactaagagggcttagaacagaaaccgccaggcagaagcagttaccagtgtgaagactagatgacaaccaaaaaagtatgtgggaggagggaggggaggttgcgcagtggggagttgagattgacttagaactgtattaatgagctttccccccaacccccatttttctcccatttaccttcagaaaaattagtgatttggctaccagtgaatctaggctccaggtgtagctctgtagttttggactagttacctaattcttcattcacaacaaaacagaaggagagaggaaaaagagagcaaacatggaattgggatgggaagtaagagagcacatgaggagagagactatgtcaagtttcttcgtattccttttttaattacagaagaaaagatgggataaaaatattccatcttatttctctgtttaaaagaaagagtaggccgggcatggtggctcacacctgtaatcccagcactttgggaggctgaggcaggcggatcacaaggtcaggagtttgacaccagcctgaccaacatggtgaaaccccatctctactaaaattacaaaaattagccgggcgtggtggcgcatgcctgtaatcccagctacttgggaggctgaggcaggagaatcgcttgaacccgggaggcagaggttgcagtgagccgagatcacgccactgcactccagcctgggcaacagagcgagactccttctcagaaaaaaaaaaaataataataataaaataaataaaagaaagagtaaatgaatcaaaatgaagagaagccattttatctgcctcctggatgaagagtttcattgatgaacctgaaatgttttggttaacatgagaaaggagggtgagaagatgcctgagatgtgagctccttgaggacaggagctgctttctctctccagcctggcacaagacaaggaacttagttgaatgaatgagcaaataagtggttctctgctttgaaggaacttggactgtcattaccttgcaaatcaggtttaccatttatttgctttatataagttccagaaagaaactatttcctctcataatattactaccctaaacttctggtctgatctatggattgtagagcttaaatttcctcaaaccccaacagtcagagattgttacaccaagataaatagcatatttctcagcgccttgtattttctgtctttggccacagaccttaggacttaggctgatatttgagaaggaaaaactggaatttagtagaattatacttcctgtatcttaattttccaactcttatataaggtttgctttttctagagagagactaatctggaatgagaatgaattctcatcagtaaaggcaaagctttaagtgggtcatctgactttgcttttgtgctctacattcaccctgctcataaaaggtcctttcatgagttttctaggctttcatcactgccagcgtctccacaggcattgtgaaagtattaaacttcctaccctcccccatgcttgtctcatggactctttcgtagagtgcacagtggactgtgtttagctcagcaggaactctttgcaaacactgaatacatgaacaacccccctggaaagataagagatttcagtattgcttggtgtcatagccgcagaagttagtgtctgccagtatctgatgaatatggtgacttgcagcctaatttttgtgaaattatgaggccaaagtttaagaagtgttcatgttaaagttacttatatataaaatttgcctatcgataatttctgtcaataggaggttgatgaatgcttcacataacctagatactcctaattaactgttttttatttctttttttctaggacacatgttcaaagagcataattaactttttaaaagaagctagtaagtactgaaatagttttttaagttttttctacaagaatagaggaagaaaggaaacatggaattctgaagggctacttagcaagctgcttatggcataatctggggtgggggtgcatagtaaaggatttgcattttactgagaccgatacatgtcaagggaatggtatttaaaattagtgatatgtgttgatttttcaaggactatagcccatcaactacaataggctccaaaaaattctggtgaaattagcttcttggagccttccagtttacctactatgttattcccactataaaatattctcaacttttggggttttagccacttaagttttttattttctctaatgtctctagtatctgctttagtttcctgtcaatgctagactctgtggttcagcagttcatccattctcttcccagtactcaacctcgttgcttatagtttcattacattcatctagcaaaaccttaattctgtatgtttgccataccattagtgcttagagcattttttcagaaaagaatcctggaaaaatggatcttatctcacctgggccctcaggactgctgggctgcctggtgtcagcacttcccgccattttctatagcaccagtattattcttaatactttaaaaaaccaccaggcacggtggctcacgcctggaatcccagcactttgggaggccaaggtgggcggatcacaaggtcaggagatcaagaccatcctggctaacacagtgaaaccctgtctgtactaaaaatagaaaaaaattagctgggcgtggtggcgggcacctgtagtcccagctgctggggaggctgaggcaggagaatggcgtgaacccgggaggcggagcttgcagtgagccgagattgcaccactgcactccagcctgggtgacagagcgagactccgtctcaaaaaaaaaaagtaaataaaaataaaaaaccatatcccactatctcccccttctctctttgcctgtgatcttgctgcatacttatggggaaatctttaagatgtcagatttcagttctctcacttttctacaacttctcccacttttgcctttcttatgtaccttcccttccttcccatctgattccttatcagtatttacacatgattagttcttgcctaacctaatagaccctttcttgagtgcaaatcagtggctatttttgctagggtataaaaattacctatctaatcaccttgacaaagttaccctgttatttccaataacttacttcctatggattcttgtagattttcttttttttttttttaatttttttattttcagatgttttctcgctttgtcaccatgcctggcctaaattctcgtaggttttctatgtaaacaatcagattttctgcaagtattagtctcctttctaattgttataattttaatttctttttctttttaaaatttttcgtagagacaaggttttgctatgttgtccagcctggtcttgaactcctgggctcaagcaatcctcccatctcagcctcccaaagtgccattacagtggcatgagccactgtgcctggccaaatttcttttcttgttgcgaaggcagacttttcatacaatactgaatagaagtgatagtagattactttatttctgattttcaaaggaatgctttccgtttctctctgttgaagataattgcgtattgtttttttttttaaatagtaacttttatcaggttaaggaaggtttcttctatttctatttaaaaggattttttaaaatcttgaattcatatgtttttatctaatgcattttctacatcagttgaaatggttgtatgaactcttttaatatgggtgaattatatttatagattttatgttaaaatatccttgtatatcttggataaactcaactggatcatgatttatcttttttatatgctagattcaatttgttgatactttgttatgatttttgaatatatattattgtgtaaaagtgagcctgtgattttctttcttgtaatgtttctgtccagttttggtgcctggttttgctctctccttagaatgagctgggaactagtcactcttgttttctcacctataatagcatctgggtccagtgttttttatgtgggacaaatttgaacttgtggtcaacctctttaattgtaagaatattcaggtcttttgttcttcctgggctagttttttattctttttctagagattcgttcatttttcttagttttatttgcctataattgtggataatctgttttttatctgctacttctgtaattatttccacatttgatttataatattaacttgtgggccaggcgtcgtggctcacacctgtaatcccagcactttgggaggccgaggcgggcggatcacgaggtcaagagatcgagaccatcctggccatcatggtgaaaccccgtctctactaaaaatacaaaaaaaaaaattagccgggcgtggtggcaggcacctgtagtcccagctactcagaaggctgaggcaggagaatggcgtgaacccaggaggcggaggttgcagtgagccgagatcgcaccactgcactccagcctgggcgacagagcgagactccatctcaaaaaaaaaaaaaatttacttgtgtcttctctttttacctgtttgttaatttatcaaataactacttttggctttgtttcatttttattatacaataaaatgaaattcttttcattgtatttcttttcattgattattcctataattcttaaacaactttataattgatgtaacaataacctgtacacatttaaagtgtaaaatttattacattttgatccatgtatatagcagggaaatatcaccacaacaagagtgtgaacatataatctctccccaaagttttcttgtgtcttttataatcactgcctcttgcccctgcccactccctcatccttaagcaaccattggtctgttttctgccactatagattagattgtattttctagagttttatacaagtgaaatcatgtagtatagtattaaccatgtgtttgtttgtttgtttgtttctttctttctttcttttttttttagacggagtctcgctttgtcacccaggctaaagtgcagtggggcgatctcggcttactgccagctccgactccggggttcacaccattctcctacctctgcctcccgagtagctgggactccaggcgtgcccgccaccacgcccagctagtttttgtatttttagtagagacggggtttcaccatgttagccaggatggtctcgatctcctgacctcgtgatccgcccacctcagcctcccaaagcgctgggattacaggcaggagccactgcgcccagcaactatgtgtttctgatcctttgtcagggctagccaattcctagagacagtgaataactcactcataatctagctgcctcctttatgtcgctctcataggactttgacacctctctgctacaatccacctgccctgttcatttcaagatcaggtaccaggaaactcgggacatccctatgctgcagaactcactgaaattattcaaactagccagtcctaaacatgcttaccctgccttgcccattccttccgctgaaaccacataaaggctcttgcccatgttttcatcccattccattgacctccttactgaccctagctagtgcttcctcatgtggcccctgcatggcatggtgtgcaccttcctcttcggaactgcgagtaactgtcttgtcagcggcaatcatcttgtgatctgttggcctcatcatatttgaataacaataaaatctgttttaaggctgggcgcggtggctcatgcctgtaatcccagcactttgggaggccaaggcaggcggatcacgaggtcaagagattgaggtgaaaccccctctctactaaaagtagaaaaattagctgggcatggtggtgcgtgcctgtaatcccagctactcaggagactgaggcagggaatctcttgaacccaggaggcagaggttgcggtgagccaagattgcaccacggcactccagcctggtgacagagcgagactccatctcaaaaaaagaaaaaaaaaaaactgtcaaatgatactccaaaatggttgtaccattttatatttgcaacaacaatgtctgagggtactgattgctccatatccttgacagcacttggtatagctgatcttttaattttagtcactttagtgggcatatactggtattttatgttttactttttattttcctaatgattaatagtttgcagcatctttcatgtgcttatttccctttcatatatcttctttgataaaaatatctgttcaaatattttgcccattattttgttggaatacttattttcttactgttgagctttgagagttctttatatatctggataccaatcctttgtcagatatattttttgcaaaattttttcccagcctgtgatttagtttgttattctcatgtcttttaaaaaaaattgtagttaaaatatacacataatacaaaatttaacattttaactctttgtaagtatacagttttgtggtattaagcatagtcacattgttgtgcaaccatcaccgccatccatctctggaactttttcatcctccctgactgaaattctgtacccatttaaacactaacttctcattcccccttactccagcccctggcaaccatcgttctgttttccttctctatgagtttgactgctctaagtacttcatataagtggagtcatacaatattttcattttgtgactggcttattagtataatgtcttcaagtttcatccatgtggtagcatgtgtcagaatttccttcctttttaaggctaacattccatcctatgtatataccacattttatccattcatctgttgatggacatttaagttgcttcctccttttggctattgtgaataatgctgctgtgaatgttgttgtataaatatctgttcgagttcctgctttcaattcttttgagtatgttcccaaaagtagaattgctgggtcatatgttaatactgtatttagttttttgaggaattgccatactgatttctatagtagtggtaccatttacattccaaccagcagtgttcagggttccaatttgttaacattcttgccaacccttgttgttttctggattttttttattttggggttttttattttatttatttattttttttttgaggcagagtctcactctgtcacccaggctgaagtgtagtggcgcaatctcggctcactgcaacctctgccccccgggttcaagcgattctcctgcctcagcctccgagtagctgggactacaggcgcgcgttaccacgcctggctaattttttgtatttttagtagaggtggggtttcactgtgttaatcaggatggtctcgatctccggaccttgtgattcacccgcctcagcctcccgaagtgctgggattacaggcgtgagccactatgcctggccattttttatttttaaacaatagccatcctaatgggtatgaaataggttttttggtgttttgttttttttttttgagacagaatcttgctgtgttgccctggctggagtgtagtgacgtgatctcggctcacctcaacctccgtctcctgggttcaagcacttctcctgcctcagacttccaagtggctgggactacaggcgcccgccaccacacccagctagtttttgtatttttagtagagatggggtttcactgtgttggccaggctggtccacgatccatccaccttggcctcccaaagtgttgggattacaggggtgagccaccatgcacagccagggttttgttttgttttgtttttactatttttttttttttttagagacaagctgtctcccaagctgtagtgcagtggcaccattcgtatctcactgtaacctcaaactcctggacccaagcaatcctcctgcctcagccttccatgtagctacgtctacaggcatgtgccaccatacccggctaactttttttttttttttttttttgagagttttgctcttgttgcccaggctggagtgcaatggcatgatcttggctcactgcaacctcctcttcctgggttcaagtgattttcctgcctcagcctcctgagtagctgggattacaggcgcccgccaccacgcctggctaattttttgtatttttagtagagatggggtttcaccatgttggccaggctgggctcgaactcctgacctcaggtgatccacccaccttgacctcccaaagggctgggattacaggcgtgcgccaccacacctggcccccagctaacttttaaatgtattttgtagagatgaggtctcactgtgttggccaggctggtcttgaacttctgagctcaagtcattctcccacctcggcctcccaaagtgctgggattacaggcatgagccaccacacctggcccctttgcccattttaaaaattaggttgtttttgttgttgttgagttgtaggagctctttgtatattctgcatttcggttccttattggatatgtgattggcatacattttttcccatccatggattgctttttcattctgttatagtatccttgattcacagaagtttttaatattgatgaggtcctgcttagtctgtgttttgttttgttgcttgtgcttttggtgttatatccaagaaatttttgccaaatccaaagtcatgaagctttgccctctgtttccttctgagttttatagttttaggacttaaatttaggttttcgacccatttttagttaatttttgcaagtggtataagggaggggtccagcgttattgtttcacgtgtagatatacagttttctgagtaccatttgatgaaaaggctgtccattgaattgcttttgcaacttttatttgggcatatttatgtgagtctgttactggttctatattttactccattgatctatgtgtctattcctctgctaatactgtcttaaatatggtagctatatagtaagccttaacactgagtagatagatttctcccctttttttgttctttttcaaaattgtcactggtttgtttttattttttactttatgcagataatctgtactatactttggtttcatgtatcaagtagtttgttccaagttgtgctttaagcagaacaaataaattttcatattgttctttgtgttaatctgcaatataaacctataccaaattctattttgtgtatttgtttattgtagtaatctgactgactcttttgcctccagactcatctctttcaaggtccccaactgaatcttgttttaggtggaacttagaagcagtagaagttaagaatctatttcacagccttagtagtctagtttcattctctatataatgttgtctatgcaagtgagctgctctccagtgccttagtttcactaatgttggggaaggtctcttctcttgttttggacttctctatcacattgcctttctcaagagaagacatataatgaaagttgatatctggtgttctaggacttcttcagaagcttgccagtttttcaagctgatttctctcactggcaactcttcagagtgctgttcctactccaccctcccctggtggtatgtatcagttttctactcatcagcacccacctactcctgcctactgtgtttctcagatgtctgctgcctggctagctcattgctgcttttgtcactcatagagctgtcttcttccctttttttggctttctgcctgacttccagggcagctgctctgtcattgcctgtctgccattctgtcttttttccccctaccccccacagatacaacatctactctaataccacacattctccatgttcaaactaacctcatcactttccccaccacattccccaaaactggtcatcctccagcttatagcattgcagttcactgaagttagacatctgggccttgcttacctccaacatctcattagccttcgattctacccctataaatcctcttctcagtctcctttagatattcctgccctgctgtgagatccatctggtttattggctagattacttcagaaagcttcagtcagtgaccctccttacttcaaaccccaccagttgatccttcactctgccatcagtcattgcttctaaaatctaaattgttccatttaaccttgctgtgataaaacctttggtagttcttcagtgtgttcagtggtaagttaaaactttcactgtaatgtacaggccccttcatgatatgatcgctgcctcctcgagcctcattgtgtgcatttccccgccccaccctttcctcacccaccctagtctttcatgtctgccatttttacattcatttagcagatatttattgaagccccctgtgatgtccttacctaggtctttcttgttgccaggaccagacaggctttttcaagcttccaagtcatctcagtttgaaagactatgtctgacccttgtcttggccaattactctttatccttccaagttcaatgattgtcccactgcactccaaccagagtgagagagcaagaccctgtctcagtaaataaaaataaataaataaataaataaataaataaataaatcagccataatttatttaatcatgtctctctcccccattgatagacgttaagggtatttccagtattcttctcttgaaaacaatgctacattgaataaccttgtacatgggtcactttgaaagtatggatatgtatccgtggaataagtttccagaagtggaattgtgtcagaggggttgtgcatttgtaattctgatgaatatttatagattatatgagagtacctgtttactcaaactcttgccaatgcagcattatcaaagttttttatgttcgccagtgtgatagattaaaaaatggtatctcagccaggcgcagtggctcacgcctgtaatcccagcactttgggaggctgaggcgggcagatcacggggtcaggagatcgagaccatcctggccaacacagtgaaaccctgtctctactaaaaatacaaaaaattatccaggcgtggtggcgggcacctgtagtcccagctactcggaaggctgaggcaggagaatggcatgaacctgggaggcggagcttgcactgagccgagatcgcgccacaacattcgagcctgggcgacagagcgagactccgtctcaaataataaaaaaaaaagatggtatctcagcattgatttctttgatcatcagtgaggttgagcatcttttcatagatttaagagaactgtatggttttttgtgagttatgtttcatatcgtttacccattttacttttaggctggaagcagctgttttagtggaatggtggaacaagaagccagattgccatggagagacaactctttctagagatttggctatgaagcagagtagagacaatgatagctgaaggattgatgtagatgcaaagaaatttttcatcttctttgaaaacttaattgtgttaaaaactggtatgaaagggaggggttaaagctagagatggtggtagaaaaaaatgcagggttcctaaaggactgagattcctggatggaatttcagggaaggggaaaatttctggatatagtgactggggagttaagggtgtctagtccaatggcttttattttcttggaagggtaggcaaggccaacagccacatgtgtgggaggagatggttagaggggagaggaggtttgaaggcaccgctatggagaattggagagagctaaggaaagacagaaagactgcagaaagtgcttagggttccactgaagcggaaatagtgatttgtagtgatacaacccttatgagttatttgatttttttttttttttaagcagcatctggcagtccaagtatagggctgacagtttgggatttttctttccatgttggtgtaaaagaagaacagtgtagtgaaggaagttaggacaaaagaatgattgaactgacaccaagttttcttgatttggtagaaaaggaaataaagatagagcagagatattgaaaagaattagagaggggttcaagagactgaaggcctgggtgaggtcagagagcaggtgtggtagacataacagagagaactacaaggatagaaagtgtggttggagagtgggaaggcaagatttattcagtatgggggcttttctgggtgatgacagcatctggagtacagccattgtcgtgagtggcccaagtgtagcagagataaagcgttgttggagtgaaggaagtcaaggaactgagaggctggcctagatggggattttggttgtcatccatgaggatattgaagtcatccaggagaatagcaggcctgggggacaggaaggaaactgagccacttacagtgtcttcagtgataggaaagcacagggcaaaaagctttcaagaacagggactgttaagccgggtacagtggctcacacctataatcctagcattttgggaggccaaggcgggtggatcacttgaggtcaggagttcaagaccagcctggccaacatggtgaaaccccatctctactaaaaaaaaaaaaaaaaaaaaaaaaaaagaaatacaaaaattagccaggcatggtggcacgcgcctgtaatcccagctacttgggaggctgaggcaggagaattgcttgaacctaggaggcggaggtggcagtgagcctagatcacaccactgtactccagcctgggcaacagagcgagactgtatcaaaaaaaaaaaaaaaaaaaaagaacagggactgttagagcaggctccaggagaaatgctttgcatatggcattcttgaggagtgaggaggacctcaaccctacttcctgaaatggagctctgagatgttggagtagaaatttggaaaccagagagagaagtaaggatagtgttgttgcaaatgcattgtatatggggggtcgggaagtcacaggagtttgcctcaaagtctttctcggagacggatgaggttttcactgtgattttcctggtcgtggtctatggatatagtacctgttagtgacatggatcttcttaacttctgatgtgtcttttcctccctagtgtacgcataccaattctctccacagcttccatcaccatgcatttgttcttttcccttgttcttgtattacctttctggaaaggaatttttattgtaggctaattgttactcccaccagtatttaaccactggatatttcatatgattgatctcttctgatttggaaaataaaaatgtaatctcattatattcatttgattagtggggacagtcaacacttctttgtgtattttcttagctgttcgtttttctcgtctgtaaattatctgtttaggtccttcagatttttcaaaattggactgttatgttttcagtattgttatgagttcttgtttcaattatttatgacagttcattttcttttttaaaatagactttttttttcttagagaaataagaaaaaataaaaattaaaatagactttgtgttttagagagtttcaggttcacagcaaaattgatcaaaaagtatggagagttccggccaggcgcggtggctcacacctgtaatcccagcactttggaaggccaaggtgggcagatcacaaggtcaggagtttaagaccagcctggccaatatgatgaaaccccatgtctactaacaatacacaaattagctgggtgtggtggtgcacacctgtaactgtacctactcaggaggctgaggcagaagaatctcttgaacctgggaggtggaggttacagtgagccacagtcatgcccctgcactccagcctgggcaacagagtgagactccgtcctaaaaaaagaaagaaagaaaatatagagcattcctaaataccacctgtccccaacacctgcacagcctcctcattatccacatcctacaccactgtggtacctttgttgcaattgatggaccaacattgactcctcattatcacccaagctttggtgttgtacattctgtagatttggacaaatgtataatgacatgtgtctaccattgtagtatcatacagaagaatttgactgccctgacagtcctctgctccacctgcttactcctctctcccttttcctaactgcacaaccactgattttttttttttttttttgagacggagtctcactctgtcccccaggccggagtgcagtggcgccatcttgggtcactgcaagctccacctcccgggttcatgccattctcctgcctcagcctcccgagtagctgggactacaggtgcccgccaccacatccggctaattttttgtatttgtagtagagacggggtttcaccatgttagccaggatggtctcgatctcctgacctcgtgatccgcccacctcggcctcccaaagctgggattacaggcatgagccaccacgccctaccttttttttaaaaaacaaggtcttgctctgtcacccaggcctgagtgcagtgatgatcactcctcactgaagcgtcgacctcccaggctcaagtgatcctcccacctcagcctcctaaatagctgagactacacacacacaccaccatgcccagctaagttttgtattttttatagaaatgtggtcttgctgtgttgtccaggctggtcttgaactcctgagctcaagcaatttgcctgccttggcctctcaaggtgttgggattacaggcatgagtcaccgcacctggccttttttattttctttttttttttttaaccagtgatcttttactgtctccatggtttttcacattggcttctgtcacttagtaatatatgtttaagtttcttctacgtattttcatgtttttagcttatttctttttagcagtgagtaatatttcattgtctggatgtgccatcacttatttatccattcgcctgctgaaggatatcttgattgctcccagtcgtggcaattataaataaagttgctgtaaacatccatgtgcaggttttttttaagtggcataagttttcatctcatttggttaaataccaaggagcacaattgctggatcatatggtaagagcttatttatttttttgagagactaccaagctgccttccaaagtggatgtaccattttgcattcccaccagcagtgaatgagagttcctgctgctccatattcttacaaacatgtagtattgtcaaatgttttggattttaaaaccaaaatccattttcatagatgtgtagtggtatcccgttttaatttgcaattacctaatgacttgatgttctgtgtcttttcagatgcttatttgccgtactgtttatcttctttggtgaggtgtctcttcaggtcttttgcccatttttaatctggttgttatttttcttgttgagtttaagaattctctgtcctttgtcagatctatcttttgcaaatattttctcctagtctgtggcttatcctctgattctcttggcattgtctttcacagagtagacattttatattttaatgaagtccagactatcaattatgttctcatggatcatgcctttgatgttatatctaaaaagttctcgccatacccaaagtcatctagattttctcctgttatcttcttggcattttatagtcttatgattgatatttaggtctatgattcatttttagttaaatttttgtgaaagataataaggtctgatatggattaatttttctatatgtagctgtccctttccagtatcatttgttgaaaagactatcttgctccattttattgcctttgctcctttgtcagttgactatatttatgtgggtctgtttatgatctctgttccgttccattgatctgtttgccttttcttttgctaataccacagtcttaattaccatagctttaaagtaagtcttgaagtccaatagcattaatctttgactcttctttaatattgagttgccccttcagaatcttaatgtctctccatgtaaactttagaatcagcatttttatattcacaaaataacttgctgagattatgattgagattgcattgaatctataggcttatttgggaataactgacatcttgacaatattgagtcttcctgtccataaacattatttatgatgggcttcttctttatgtttaggagcttttgttttttctgtcagatattccacttctacctttatgatttcttaattgccttttatgcttagaaagtttttcctcatcctgagctcacatattcatttattttcttttaaaatgtgttttcaagcatttaatttttaaacctatgtggaatttattttggtatatggaatgaggtggtggtctaactccctcctctcaaatatgtagttatttttcccaaaaccattttctattaatttatcaagaatagacatgtatacatatacatatataatagtcagccttccacttgttgtttgacccttgtgaaggaaattgtatgagtttccaattttggattaggctcaggtagtaattgagctgggttctgccagagatccatgttaattcactatccaaacagagttataaaatgtaagttttatgaaaatctaacagtatatcactggtttaatgatcacagcctaggaagaatggggaaattgtcaaaatcttctgtggatgcacctgaaggccactgctgaacccatttccctgctaggcacggctgctggtaccaggggcaaactcctggagtatatatgaaccacctacatctccttctcttccccccctacccttgagattttcatgtgtcccttaaggatgtgtgtcctacttcccttggagagtcactaccacattgaacactttagactgtgagtcctgtgaagatggggctcatgagtgtattgctccccagttgtttctctagcactagctcagtatagggcataaaaatctgaatggatgaacaaaccactattactggtggggacatgctactatcttacatggttcgaggtggaataaaggttgagaacagctatataatgtgttccttgaagggcagcagtacatcagtgcaatcagcctaccttctccatacttctcactctgaaaactgtaaagctgcacctagcaatcaacttgggagctttaaaagggactgctccctagctctcacccacaaagctgtagtctagcacaggtgacttttttaaaaaagttttttggtccagatgtgatgactcacgcctgtaatcccagcacttcgggaggctgaggctgggaggtcacctggggtcaggagtttgagaccagcgtgaccaacatggagaaaccccatctctactaaaaatttgccgggcatggtggcacatgcctctaatctcagctactcgggaggctgaggcaggagaattgcttgaacccgggaggcggaggttgccgtgagccaagatcacaccattgcactccagcccgggcgacagtgcaagactccgtctcaaaaaaaaataaaaaaggagtcctattaagacttatttttacaggttggatatctctaatcccaaaatctgaaatgctccaaaatttgaaactttttgagcgcagacatgatgctcaaaaaaatgctcactgggacattttggatttcaaaatttggattagggactaggtgtgggagctcacacctgtaatcatagcactttgggaagttgaagcaagaggatcagttgaacccaagagtttgagagcagcctagacaacatagtgagacgccgtctctacagaaaattttaaaaattagccaggcatcgtagtacatgcctatagtcccagctactcaggaggctgagacagaaggatcacttgagtccaggaggtagaggctgcactgagctatgatcataaccactgtctccatcctgggcaacagagcaagaccctatctcttaaaaaaaatctgaaacactgctagtcctcaagataagggatagtcagtctttataaagactcaattagttattggatatctgaggaagcatgcatatcaggctcccaaaagatcattggtttaggcacacattttaatagcttggaaatccagaatactcttctggtgaccagctcagacatagtcctgataatataggacctcatctaacatgactccctattttccagataagcatggattcctggttcattcttgttctgctcggcagtggtctgatatgtgtcagtgccaacaatgctaccacaggtaaattgtcatttgataaggctgctatttgaaatgaaattttgctttcacatttaatgagccacatttgaaaaccgagatggtatttgaagaaaggaatataaaaattttattcaaagtgatggtaaaataggtgtcttcagaaatcttggaattgaatgctcagcattgtttttcatacatacataactgctttaaataaatcaaagagattatgtgttctttcctgaaaagtaaaataaattgttgacatttacaactctatatatggtttctgaggaactaagtgaagaatcttgtgtctttctcccttaaaccgtagtcctttggaggaggtaggaaaggtccagcatgagataaaaacgtagggggtgggtggtgttgagggggattggtctttgcttggtctccatatgtttgagagtttattaaggcttgctgctttgtgtctcacagctttttagcctcacattcttcatgtgctatttccttgttttttggtgtttgtagttgcaccttctgtaggaattacaagattaattaactcatcaacggcagaaccagttaaagaagaggccaaaacttcaaatccaacttcttcactaacttctctttctgtggcaccaacattcagcccaaatataactctgggacccacctatttaaccactgtcaattcttcagactctgacaatgggaccacaagaacagcaagcaccaattctataggcattacaatttcaccaaatggaacgtggcttccagataaccagttcacggatgccagaacagaaccctgggaggggaattccagcaccgcagcaaccactccagaaactttccctccttcaggtactagagatgattctgtttgttcttttgctctttgagtttagtcttccttttattatcttgtttgtgttttctagccttaaaatttcttcaaataagtaaaattgctcaagtgaagtaatgaaacctgtatgtggaatttttgggttagcatgagtgaagaggaaagaagaaagattctggagaatatctttctgctaggtgggatcctggttagattgagaggacttaaatgtgtttaaaggtagagaagaaggcttaaaaagacaagagaaatagaggagctcattgacgatgcaagagactgaagatgaaaagatacagagaatgagtaataagattaggtttggaaagggagggatccgtggagaccatggaaaggagaatgggtattgatgtccatgacagttagatgtgagatacagagaatgagtaataagattaggtttggaaagggagggatccatggagaccatggaaaggagaatggacattgatgtccatgacagttagatatggagtggcaggccagtggccaggggtggcatcaggctctgggaaatggttacattgcagtgccagttgttcagggcctcaggttgaagcagtagtcccaaggagaaaatcagagacgtggatctgagaccagggcaggtaagacaagtttctgacctctttgaaccttaggtaccttgtctgtaaaagaggattagagataccctcaaagggcttctatgaggagtaaaggaaataatcattacctgattgctatgtaactgtcatcccttttctagcaaaaatcactctttcctcttctgtgttcccagttagatggtgagtgcccctaagcagaatcacatctcgctcatgtggaacattcaggaactgtttgctcagttgattctcatttgttactacagatgatatcttttactgcgccttataactcagacccttcacctgccagcttttccccatattttctaccgtaaagacaagacagcatttgcagttaagagcacagtcttcagtgccacactgagtttgaatcccagctcttccataaaccagccatgtttatggcatagctggcttactttatctctctacctcggtttgttcatctgtgaaacaagaatgagtgatagtaatagttcttacctcatagaggagatattaggattaaacaagttaatatgggtaaagcacttataaaggtgcctacacatggtaagcactatttttaagtgtgagctgttagtattgttgtggttattgctctgatagttaccagtaaaatatatgaaggtacctttaatgcagatggcatcccactattcttgatgagataggggactgcagacaaataatgtctgatacttgctttgtgctttagagttaatgtagttttgtcatagttattactgtgtgctaggcatcgtactaagagttttctagaataatcctatgaattaagttctattttatgttttataggtgaaagtattttacaatgatgaaaccataatttgtggaatgtttttcagtgtacaggtcatgacacaattcatgaaatcactttagcaggccaccactagttgtttgttttgttttattttaatggatgatccagttccatgtttattcttttaatgttacatacaattttttgaaattttagtaacaacataaaatgttgggttgtggccattgcttagggagaaaggcaggataacttgtacaaactgtatgagtgaatggaaaaggtggagactgtaacacaggcctgactgactgaacagcccatgttctattgtgtactgtctttcatttaacagttctgtgacatgaccatggataatcatctccttttaacagatgcttgatttcagactgtatatagaggttaaatgatttgttttagatctcaaggctgacaaattaggcctatttctcacttttgcggtctttccactctgcttgtagggaacttagttttccataaactgacttaggtccaaattgtgccacagctaagaatctagttattgtacatttaacacagttcacgtcataggaggctgagactatgtttctctagtggcgtttattcaagatgagtaaaacacaagaaaccattatcgcacatgggaatttcatagtcttaaaccccacatcccacttatcaccaccatttaccagtcctcctgtaacagttacaattttttattaaatcagtatttgatgtatattattgtaattatgaaatattcattgctgagctataagtataaatggattgtttttcttgtacagttttttttctggatttaatacttaccttattttttgtttatttagttttctatttagtcaggccaggcacactggctaacacctgtaatcccagcactttgggaggccaaggtggacagatcacttgagctcaagagtttgagaccagcctggggaacatggtgaaaccccatctctacaaaaaatacaaaaattagctgggcatgggtgcatgtgcttgtagtcccagctactcaggagcctgaggtgggaggattgcttaagcccaggaggttgaggctgcagtgagctgtgttcataccactgcactccagcctgggtgacaaagcgagaccatgtctcaaaaaagttattgctactcaattcttaccatgctctccagagcctctcaaaacagctttctacaaagtgagatctgttagataatctatttcttttttacctctagaaattcctcctgagccctccattgtcttattccagtctaggcttgtcgatctctagggctactacacagatacatcagcctgagatttcccttctctgtcattctgggaattccccttgctgctgcttcctgacttccatattgtcttcctttttgtcttctcatcattcggtagattcctgagaaaaggggtccatgggaggcaaattgcatccttacatatctaaaaatatctttagggctgtgcatagaatttgaggaatatttttcccccagaatttttaaagtaatgccctaactgacacctgtttaccaggtttggaggattttactgctatcttaatccctaattgtttgtatgctttctaggatcttctctttatcatcagtatcctgaaatttcacagagatgtatcttgatgtgggtctttttcgttcattattatggatacttaataggccctttagagccttgatcttgcatttctgaaaattttctcccatttctttgaaaccttctccccctcttccttttttttttttctcaaattcttaatatttggatattggatgtatcctgaattaattctttaatctttaaaatttttcctttctgttgatctttgctttgagtctttttctccttttaaaaataaacaaaggccagctaggcacagtggcttatatctgtaattccagcactttgggaggctgaagcaggaggatcgcttaagcccgggagtttgagaccagcctaagcatcgcagcaaaacctcatctctacaaatgatttagaaattagcagggcctaatggctcatgcctgtggtcccagctactcagggctgaggcaggaggattacttgaggcctggcagttgaggctgctgcagtgagctgtgatcgcaccaccgtactccagtctgggcaacagagggagacctcatctcaaaaataaataggcctggtgtggtggctcactcctgtaatcccagcactttgggaggccaaggcaggtggatcacttgaagccaggagctcaagaccagcctagccgacatggcaaaaccctctgtctacctactaaaaataaaaaaattagtcaaacgtgttggcatatacttgtaatcccagctacttgggaggctgagacatgagaattgcttgaacctgggaggtggaggttgcagtgagtcaagtccctgcactatagcctggggaacagagtgagacccgagactctatctcaaaaaaaaaaaatcagtgacaagtaaaaaggtagaatacctttttttttttctttgagacagtctcaccctgtcgcccagtctggagtgcaatggcgcagtctcggcatactgcaaactctgccttcagggttcaaacaattctcctgcctcagcctcctgagtagctgggattacacatgcccaccaccacacccagctgttttttgtatttttagtagagacaggtttcaccatgttggccatgctggtctcgaactcctgacctcatgatccacctgccccggcctcccaaagtgctggtattacaggcgtgagccactgcgcccagcctagaataccttttaaaaataaataaataggccgggcgcggcggctcatgcctgtaatcccagcactttgggaggctgaggcgggcagatcacgaggtcaggagatcaagaccctcctggctaacatggtgtaaataaataggccgggcgcggcggctcatgcctgtaatcccagcactttgggaggctgaggcgggcagatcacgaggtcaggagatcaagaccctcctggctaacatggtgaaaccccatctctactaaaaaatacaaaaaaaaattagctgggcgtggtggcaggtgcctgtagtcccagctactctggaggctgaggcaggagaatggcgtgaacccaggaggtggagcttgcagtgagccgagattgcgccactacactccagcctgggcaacagagcaagactctctctctaaataaataataaataaataaataactccttttacaaaagcatatatattcattttttccatttataatataaataatagatatgctgagttgatttctgcatattgctttttcagttaccctatcatacttgctctttgttttagtaaagagctgctgtattgaaggatataccttaatctctttatccagtttccccatcagtggacactaagattgttttcagagtactcttataaacaatacagtttgtcatttcagacacatatgagaatattagcaggatgaattattttaagtctgcatttataaatttatggatattgccacatttacctctgctaggaagtctattcctattaacaatatgtcaaagtgcctatttttctaaactctcttcagtgtggtgaattgttaaacttggggatctctgccaatctgacaggtgaaaaataacatctcagtgtaagtttaatttgcattttgctgagattgagcaattttgtgtaatttaaaagatcatttatttttctgagcattctctgttgatattctttacccatttttattagagtgtcaaggttttcctgactcgtttgtagatgttctttgtacgtttgggaaatgagtcctttgcctatggtaaaactgcaaatgttgttccctaggtggtcatctagattttctgcattgcagaagatatcattagctatttttaatttttttaatttaaatatttctcagtttaggttttctaggaattgggtcatatctaggaaggctttccttactccaagattataaaaataattttcttctggacttctatggtttcgtgtgtgtgtgtgtgtgtgtacacgcacttaagtctgtctcgaatttattctgatgcagagtgagctatggatctgtttttccccaaatatctaacttgtcccaataccccttaataatttatttttcctcattgatttgaaatgccacctatcttatatattgaattcagatatttatttacctcttcatatgtatttgagtatttgggaacattcattttattttctattaatctttttctctgtccatgtgcaaagcctcactgtctcaataattgtaactttgtaaagtatttaatatccagtaaaatgagtcattccttgttaattttatttttcagaattttgttagcaattcttattataaacattagaattaacttgtctagcaggaaaaaaagtttgtattgatcatgttaaatacgtagattaacagagaaaatggcatcttacagatgttgagtctaactatccaagaatgcaatatattccattttctgaagtcttttttttttaaatcttctgtttttgtaattataaatggagcattttcttccatcagatcttctaactggctgctgttggggatatgaaggctactgatttttgtagagacattttgtactggccaccttaaactctcttagtattggaagtaattttcttcattaatttttatggcttcaagtcatctcatctgcatatatcttccaaatttttagaactttctttttcttctgtttaatcgcattgatgaatacctccagaacaaagttaagcagctggtaaatgcagacagcattctcttgtatctgacactaaggaggacactttcagtggtttttcattatacgtggtactgactcttgagttgagataaacatattttattgtgttcaggatttaatgagcgtttatgttaggaatgggtgttaaattttgccagttgcctgttcaggatcaatgagaaagatctgaatgattttttttctcttttggtctgtttctatggtggattctattcctaggtttgtttgtttgtttgtttattttgagatggagtctgttaccaggctggagtgcagtggcgccatctcagctcactgcaacctccacctcgcgggttcaagtgattcccctgcctcagcctccgagtagctgggactacaggcacgcaccaccatgcccggctaattttttgtattttagtagagacgtggtttcaccatgttggccaacctggtctcgaactcctgaccccatgatcctgcctcagcctcccaaagtgctgggattataggtgtgagccactgcgccctgccagtttttatttattcattttttagagacagggtcttgctctgaattaattctttaatcttcttaatttttcttttctgttgacctttgctttgctttaagtcttttcctttgagtcatccaggctgaagtacagtggcacgatcatggctcactgtaaccttgaactcccagacttaagcaaaccccacctcagacttctgagtagctaaggactataggcgcatgtcaccacgcccagctaatttttaaattttctcagaaacagggactcactgtgttgcccagactggtcatgaactcctggcctcaagcagtcctcagccttagccttccaaagcactgggattataggcatgagccaaggccgcccaaacatattgtatcgttcctgtaacaagctgttgcagtctatttgatattatttcttatttttttcatttagaattttctctgtctagatattctcaaattatctctaaatgagattgatctatgtttttcctttgtgtgtgtattctttttgataagttttagtttttagtgttttgttttgctacatggaaaggatttgaaagtttacactaaaaaatatgctttttttttttaagacaggctttttcactgttgcctagtgctggagtgcagtggcatgatctcggctcattgcggcctgcacctcctgggctcaggtgatcctctcacctcagcctcccaagtagctgggattacaggtgtgttccaccatgcccagctaattttttgtatttttttgtagagatggggtttcgccatgttgcccaggctggtcttgaactcctgggctcacatgattctcctgtcttagcctcccaaagtgctaggattacaggtgtgagccaccacatctggccatttcattcatgttttcaaatgtatttgaatgaggaaaagttctcccttgtgattatttattataatagcctacagagctattaatttttaaattttgtttactttatgtctcctttttttttttgtttaggctgaataaccatttatttcataggtttattgccttttttcttccaaagaacttgctattgtgcatttatagtccttttatgtttacgttttctatttcattgatttttactttctaccttctttagatttattttgttctttttctatcttcttgaattgagtgtgctttaattgcattctttccagttaattaacatatttagtgctgtgaattttgaacaagcacagctttagccacatcccataggtgtttctataggcagttgtattaggatgcgctataagctgctctgacaaagataccaaaattcagtgacttaaataagaccaaagtgtctttctctccccagttacattccagaggtagacagggccttcgtctcagtagggaccaaattcctttcctcttgtggccctgccatcctaacaatattgcccttatctgtttggttagagatagttctcaccattgggttctagttccaaccactgcgaaggacaaacaaagggaataggggccatttctcttccaaaagatgtgacctggaagttactcacattgctttagctcacatcccgttggctagaattcatcacatgaccacacctagcacaaaggagtctcaaatatagtctgccaggagagcttggtgctcagctaaaaaacaaaggttctgtatcaaggcaagaagagaaagagactgatctgaggggaggagagttggcaggttctgtcacaaaacttctcgtcattgttatttttaaggtatttttccattttgggttttttgtttgtctgatttttttttttttttttgagatggagtctcgctctgttgcccaggctggagtgcagtggcgtgatctctgctcaccgcaagctctgcctcctggttcacgccattctcctgcctcagcctcccaagtagctgggactacaggcgtacaccaccacgcctggctaattttttttttgtatttttattagagacagggtttcactgtgttacccaggatggtctcattctcctgactttgtgatctgcccacttcggcctcccaaagtgttaggattacaggcgtgagccaccgcgcccggccgtctgtttgatttttgagatggaatctcactctgccccccttctggagtacagtggtgtgatcttgggtcactgcaacctctaccctcccaggtttaagcaattcttgtgcctcagcctcccaaagtgctgggattaaagacgtgagccactgtgcccagcccattttggttttgatttttttttttctttgaaatagagtctcgctctgttacctaggctggagtacagtggcatgatctcggctcactgcaacctccccctcctgggttcaagtgattctcgtgcctcagcctcccaagtagctgggattataggcacccaccaccacgcccagctaatttgttttgtatttttagtagagacggggttttaccatgttggccaggctggtctcgaactcctgacctcaggtgatccactgcacccggcctcattttggttttgatttttattttcaaatgttttcttactttgtcaatttctaattttattgcattgggacaaaagaatattgtactctttctactgttggggtttataagggctgtggatatttcactcgcctttgaaaagaaggttttctctgttagtctgtagagtttggtatgtaccaattagattttattacttatcattttggtcttttgtatccttacttaattttgtcctcttgaattttaatggagcaaaagacataaagtcctctaataacatgcgttctgtttgcattctcatactttttatgaatattgatgctgcactatttgtgtacccagggagaaggccagaccactgtccaaagtttagtgaatctgggcagccttgtttcccagttgttggaggatgcctcatggaggaaagcattcctaatcctggagcttgttttgttgtactctaattgaattgtaatgtgtttctttaacctgaatgaatgtttctattttttacttattacacaggtaattctgactcgaaggacagaagaggtgagctgctcaccttatatctgttgttccttttacacagtgtacagtattcatttatttcctctgctcacagtctgtggtaaccgtgtgcatctgtggctgtgttgtttgtttactttcccttaagttatttccatgttaatctcatggagaagagcaatagaaacaagtactgtattcagtatgttttttaatatagactatggattctaacagctatgatgtattttaacaagtaacaaaatatatcttactttgacatgtcactttgttaacattactttttggtgatattaggtcataatttctataccattagttacttctgatttctaggccacagttccctttaaatattctttgtgttgtttttcccctagtgtataaaatgtcaaccctttgtggctttatatggattttatggattttcagcccttaaatgtaaagtctctatggcctgagatgttgtgtctgtggtttaagctggactgctgagtccctggtcactagagagtagggggacatgggtacttgtctgcagaagtgtggcacattttgcctagaatgacagtaaggctgctatcaaagagcatgagagaaagagaaagagatcatctaacattctaagaagtgattattacatttgagttttaaaaatgttactattcgaagcagtgtttttatcataattttctattttatcaaatcagacttgagttttttttctgattctgttatttaaccatacacaattttccctgtgtaattaagtaatggaacacttggaggcatatgaagtcccactaagtagggagcatttgagtcagaaaagtgggtactctcttcctttatgtgatgtccatctgccattgtatttggtaaggaatagtgaggtgttaccatactgtgtacagatttccctcacttttccacctctcactttcctaaacttgggaactaaacattggattaatacagtgtctttgctgttcagattcacttgccagattttatcaaatgtagacttaaataggttttattgtgatagatatttacttgctccctaaaactgctctcttaaccagccttacaataaagtcaaaagtcaaagtggtaggcttcaagatgaaacataagatctgttgactccttcctctatttagtatatattttcataatattcagccttttcttgccccagatatcatatctattttacctacccaatatttaagtagtttccatgttgtgattaagaaaacaaaattaccataattacctagattattgctaattgtgacatatgtaaagtctattaatgtaataaatctcctttcttaagtcaaaaaataattttgtgtaattccaaacaggaaactgaaaaggcataggtattctcagcagtctctaaagtcccaaaatctaatggcaattttaccagagcagatctttagaagtattgctataaatttggatatcccattctaattttaagccaaatgctttttgagaaataagccagctgtttggaaatgcttgtattataatcggtttgataagcagttatgtcttatgcagatgaattaggggctacctgtttttatgcactggtctttggggtgcttttgaacagtagtgtctgatgttttaattgtcaaagcaaaaagaaatgagagggagggcaacttttcttcctcttctgaagtccaggaaactggttattttctcatgcatattattttaaaatatattccagccaggtgcagtggctcacgcctgtaatcccagcactttgggaggccaaggcgggtggatcacaaggtcaggagttcaagaccagcctgaccaatatgataaaaccccatctctactaaaaatacaaaaattagccgggcgtggtggtgtgcgcctgtaatcccagctactcgggaggctgagtcaggagaattgcttgaacctgggaggcagaggttgcagtgagccaagatcgcgctcttggctgcgatccagactgcactccagcctgggtgacagagcaagactctgtctcaaaaaaaaaaaaaaaaatcagactcttaatatttgtaaagaagtagtccttgagctactacttaagtctagaaagagttgatattcttgttttaagagtgttagggcactttgggaggctgaggcaggtggatcacttgagcccaggagttccagaccagcctgagcaatatggggaaaccttgtctctactaaaaatacaaaaattaaccaggcatgtggtacgtacctgtagtcccagccacttgggacgctgaggtgggaggatcacctgagcccaggaaatggaggttgcagtgagccaagattgcgtgactgtactctagcctgggcaacagagcaagactctgtctcaaaaaaaaaaagggcggggattatcatagtgccattattattatgagtttatgatggctttctctaagcaccttttacattcggcatttattcagtacctattaagcatcaaggagtccagaaaaaattttatatataaatatatataaaatatgtaaatatatatatgcatatgcttccctatctcaggaaggaaatatgtgaacatcaggaaccgaagtctactcagttacatgccattggatatatcacacaaagtgctgagggaactcagaaggctcattatatctggggagtgggaaggaggcacagagatgtgctttgggaagtttaaattaaaatagcaaatggggaaaatgaagacacaccagacagggcacaagcaaagagacatgaaagagtaagtcatgtgtttgaggatctgtgcgcagttgacatgtgtgaggtgtggggagtgatcagaggtggcctcaacagaatgggtgtggtggtccactgagttcaggagttggagcatctcctgaagatgatggtgagtaaggaagtaacatagtcagattttggttttagaaagatattccagaggacttaggggagatagatggacaatagaaatttaggtttctgaataatttggctcaaaacaacggtgattgggctcaacccagtggttagattctagaggcaatccaatgaatattgctgtttttagagccaataggaaacatttaaaacaacattacaaccttgcctttgagagctgataaatacttgtaccaaaaagtgtggcaataggtaaatgggccataggaactggggctataggactatggctattcctttactgactagtttgtagttgaccagtgtgtgtctgaagtccttaagtcactcacctgtttagaggtgagcccttcaattaatatggccctttgttttcaaggaaagaagttatagcaagtaggtatctgttgtcccgggacaccattttagtggttttcattttcatgcttgctccctggcctgaatctagaaagtaaaactttgctggaatgaagttggggttgaaacagtttcggtttgtaaccatactgtctctgtctcatctactcagctctgcctttgtaatgtaaaagcagccatagatggtatgtaaatgaatgaacatggccatgttctgatagcattttatttacaaaaacaggcagtgggctaaatttgggctatagtttgccgacccctcttctaggcaaagaactgcctgagcgtaggaagctggactgaggttctctgctagtgtgtgaacttgtggatgccaaagccaatctcttcccttcatgtcagacactttgcaaatgttacctcttttagatctcccattaactctaaaaggtggagggtgctattatgcttccatttcatacattgttctaagagattatcacactactagtaagttaggatagtaggaatttgaacttcaggtctgtcagaccctaaaaccccatgccctggaaatggttttctaaggctggcctgtggttcgttggttgatttcaattagaatttaagaattttttcagaatacatctaggtgtaaagatttttttgtcaatattactccacaaactagattatttcttttggcctgataactcaggaactttcttgtattacttctctcccttcttactggtttcttctttggactctcctgttgcacaggtattggatctcctggacctatccagttcctttcttttctatgctgtcatatttttcatctcttattgctctgtgttctgggagcttccaggacagttgctctttcacacaactaatttggttttcagttatatcagttctcctatttagcctttctttttttggaggcagggctggggcagactcatgctctgtcgcccaggctggagtgcagtggcctgatcacagctcactgcagccttgacctctgggactcaagcgatcctccagcctcagcctcccgggtagctgggactataggcatatgccaccatgcccagctaatcaggtgtttgtttgtttgtttggtagagacagactaccagagtctcgctaagttgcccaggctggtctcaaactcctggcctcaagcagtcctcccaccctggcctcccaaagtgttgggcttacaggcatgagccaccgtgcccggccctgttaagcctttctatctagattttttccctcctaatcatgttggtgtttttttgtttgttttcatttttgttttgttttgttttgagacggagttttgctcttgttgcccaagctggtgtgcaatggcacgatctcggttcaccgcaacctctgccttccaggttcaaacgattctcctgcctcagcccccagagtagctgggattacaggcatgtgccaccacacctggctaattttgtatttttagtagagatggggtttctctatgttggtcaggctgctcttaaactaccaacctcaggtgatctgcctgcctcggcctcccaaagtgttgggattacaggcgtgagccaccatgcccggccagtttttaaagaactccttcttactactcagattactcctttttaaatagtggcttttaaaaaatatcaatgtaggctgggcacagtggctcacacctataatcccagcactttgggaggctgaggcaggctgatcacctgaggtcaggagttcaagaccaggctggccaacatagtgaaaccctgtctctactaaaaatacaaaacttagccaggcctgcagttccagctactagggaggctaaggtgtgaggatcgctcgaaccaggaggccgttgcagtgaaccaagatcacgccagtgcacttcagcctgggtgacggagtgagactccgtctcgagaaaagaaaaaaaaacgcaatgcagcagtggctcacgcacataatcatagcattttgggaggccaaggcaagaagatcacttgagaccaagagttcaagaccagcctgggcaacaacaagaccccctccccccatctctacaaaaaatttaagaaaaaaaatttttttaaatcaatatggcatcctgttgcacaaattgcagtatattttgaaagatttattctgtttcttttgtcacctccatttcccagggctactgttgctctgtttgagctatgccctggaccattgagtggcttagactgtgctcacaataggtgtcccttcatcccttcagaagacaaacatggacatacgtcctaaaccaggaaggggttcagtgatggctcaggaaaatcggggcagggtgcagttatcctctaggcgagctgccgttttctttttcctttcctctcttgtggttgcctagaattagcttgggcactactatggtttttttctgtctgcaggccccaggagaccttctgtggacccaatatacttaacaatcatatgcagtgtagacctgctctggtgtcaattctaaccaaaacaaaaaaaaagcatttatgagacactcagggaaattcaagcagtaactgaataatattagatgatactaaggaattagtgttactttttaaattggataatagtattatgtttatgttaagaatcttgatctcttggtgatacatacctaagtaattgcatttgaaatgctaggtctcggatttgccttaaaagaattcagttagaatggcgtgagtatagaccagtggttccttactgggggctatttcccccacaaaggcatttagcaatgcttggagatacttttggtcatcaaaattgggaatttgctacagacatctaataattagaggctagggatattgttaaatgtcctacagtgcacatgacagacccacataacagagaattgtatagcccaaaatgtcattagtgtgacgttgagaaaatatatatgcagcatatgttttgtaaaaaagaagcccttaccagtctctgtgacaaactctctactctgtgtagagcactgtttttccagctgagtctagatgggaagccccgcttgtcatttgggctgtgggtgtactggtgctgggttggcaggcctttgcttaagtaccatcctggtacctcaaggtccactttcaaccccagtcccaattccctctgagcttgaggtgtttccaggcccaaactggtagaactagtacttagttttcagctggaggctctttggctctgtttgatctcttggacatcgagtctggtctgttttgtcttccagaaatctctcaaagattctgatctacatatgccaccgtttgctgcctttcagatatgctgttgattcattagtatttttatatttcttctaccatgtcagtgtgctttgggggaagatgaagtaaattcatggatttagcccagtgtcttaagccaaaggtgcctaattactttcttcttcttctttttttttttttttttgaggcagagtctcgctccgtcacccaggctggagtgcagtggcacgatcttggctcactgaaacctccgcctcctgggtacaagcgattctcctgcctcagcctcctgagtagctgggaccagaggggtgtgccaccacacccgctaattttgtatttttagcagagacggggtttcaccatattggccaggctggtcttgaactcctgaccttgtgatccacccgcctcggcctcccaaagtgctgggatgtgcctaattactttcttataatacctgatatactgccccctgttgttggaatttaacaaagacatttagtgataaattactatttttttttgttctttggctcaacgtaatccattgtttgttttgtgcctgttatgtgtgagaccctgtgctaggttttaggtgtacagtgagaatgaagcagacatgtaatccttgctcttgtggaatttatgctataaaggagggatattcattaatcaacaaagtcaaatatgtaattataaagtgtgagaggtattatcaaggaaaataataaggtccttgccttacaaaaatagtataggaaataacagcaattttttttttttttttgagacagagtctcgctctattgcccaggctgaagtgcagtggcgcaatctcggctcactacaacctctgccccccaggttcaagcgattctcctgcctcagcctcctaagtagctgagattacaggcatgtgccaccacacctggctaattttttttgtatttttagtagagatggggtttcaccatgttggccaagctggtctcgaattcttgacctcatgatctgcccacctcggcttcccaaagtgctgggattgcaggcgtgagccactgtgcctggccgtaacagctaaaatgaagtacacactgtgtgctagttactgtgccaacaactttacatgaaagatctcatttaatacgcagaataacttatttcagaaatgaggaaactgagacttatgatcctaatttagtattaggaagtcagagaagacctgtgtgggaaaagtgacacacagagaaccagacaagtaggagataaccaggcaaagaacagagagaggctgtgtaaagcagaaggaataacatgctcaaaggcctgaggatgaatgaatgaaagcatggaaggacaccagtggctgaaattgagtgagcaaggaaagagtgcaagagatagggcaggtaggggctaaatcgagggggttgttagagtccaggataaggagattagatttcattctgaggcatgagaaactgttggagggttttacctaagagtgggacacaacctgagttgctttcctagagatcactctgctttgtggagaatggattggcaggggcagaggcttactgtgatccaggtgagagaggatggaggttgggactacactggtggcaataaaaaaaatgcaaaaaaaaaaaaaaaaaaaggcagacagatttgaagttttagatatatctccaaaatatattatttgcagctgtgctagatatagaagataagtgtgaggaagaaatcaagggggtttccacatttcttacttgagcaacagggtgggttggagtactagctactgaatggtgagggaaaggttttaaacacagaaagcttgtgttgcctatgaaatttaaagtggaggtggcaaataggcagttgagaatctggaactcagaaaagaggtctgatcaagcaaagcaactgtgggaattgctagcatggcatttatatttacagtcatctctctgatcagattaactagatatagagaagagtgccaaggacagagccctgaggaattcccacatttagagatctggtgttggaagaggaacagatagtgagggaaactgagatgggcagacgagatagaaggaaaatcagaggagtgtttcgttgtggaaagctaagagaggaaagtgcttcagagaggaaggagtgatcagccagtctgaacactcattttaaggtgagagccacataccacagtatgtttgaaacttaccattaacaaagaagcgtcatgtaatgtcttccatctctaaaaacaaaaccaaaaaaaacccatctgtccacctcactcacatctccctccatctgtcattcctttcctctgcatcccttaatgttaaaagtccccacgaaaggacccagtgtctcactgtcctttttctatctttatttcactccatttaggctttctcacccatattcaactgaaaatactcttggaaaggtcaccagtagccaccgtcttgtcaaatctggtttcacttctctgtctcatccttcttaagtctgtaggcagtatttgattgaattgattgctccctccttgaaaaactctgctcttggcttctatgacactacattcttagattaacctctcacctcatggctactgcttatgggtcagtttagcttttaacagaatgtaaatccagttatatatctcctctgttcaaagcccttcgatgacatagtgtttctcatcacactcagaattaaatccacaatcattacaatggactcccaagtcctaagtctgctggcttttgcccacctctctggcatcttatattgaactggcctttgtgctgtttcttgaacctgccaagctcctgagagctaccatgcttgctgttcccagtgtctagaaagctcttcacccagatctttgcgtggttcacttcacgttatttagagctctgcttgtatattacttcctcagagagaccttcccagaccactgtatcactgctccccaacctgtcactttctctctccccaccctgctttttattcctcatagcacttgtccctgtctaaaattaagtattgacttgtttataaacagtgtcttccttcctccccacagaatggaagctttctatcacttgtctccttgaacacttctctgttcctagtgtctcaaacaatggcatgcaattgctggcccacagatatttgaatgaatgctgctaaaaggttgaatcagatgaggatgggaatgttcctgttggatttggcaatatgccatttgttggtgttctggctgagcagtttaaacagagcactgagggtgggagtcagggcaaatagattaaggagaacctgaaggtaaggaattagacaagacgaattagacaactgtgtttcggaaagtcagctgagaagagagacgcgaggctggtggtagctgggggagggtaaatgaggtcaagaagacaagtctttgagttgacagcagtggatgtaatccagagcacacatgacaggatggaagagacttgtcttcccttttagcaggtaggaaaatggtgaagatagttaccaagccactctgatggtgtagttcatggagtcgggtggagggtgagagtggaggcggatgagtcagtgcctggccagctgcatgagaaaacaaggctaggtattgggtgaaagggagccaggccctgtggaatgaggtgggattgccatgtcttcaaaccagatgttgccatggttggggtcctggcaaaaggtgactaagggagcagggtgtggaaagaggaaaaaagaagcaaccagcagttttgttacatggtggctgaggatctaataatgtctccttgttttattttatttttatttagctggtctcaaattcctggcctcaagcaatccttctacctcagcctcccaaagtgctgggataggcatgagccgccacacccagctgtctccttgtttgtttgtttgtttgtttgtttgtttgtttgtttgttttgagacagggtcttgctctgttgcccagggtggagtgtagtgtacaggcccggctcactgtaatctccatctcctaagctccagtgatcctcctacctcagcctcctgagtagctgggactataggcgcacatcaccacaccggctatttttttaatttttagtagagatggagttttaccctgttgccaggctggtctcgaataccttggctcaagcaatccacccgctttgtcctcctaaaatgctaggattacaggcatgagccattgtgccctacttgtctccttgttttaattaggaacagtattctctgtgcccggaaaccatttgggtttatgataggaaaactgtctttttcccttcctctcccatcttcctctagatggaacccattgaggctgagagagtgtacagtgttggccctgcatacctaacttgccatcagaattgaatgtgttcatgcctccagatattccagtgctttttatgtgctaagtactgttttaggctcaaaggatatagcagtgagtaaaacaaagtgtctgcctttaaacagcttttattctaatgcagggagacagagtaaataaatgtatgatagtcagagatggggtgagcatgtcatcctgggccccatgctctctccccacctcacctcaatagccctggcatggcagtgggaggtgcacactcatactttcttctctgtttccatttcctggcatctgcagaaggactgaatgagctcttcctcttcagggtgttgccctgaatggctgacttaagccctccattgcacaacacagtaatgacttgttctgttgtcttgatttcagatgagacaccaattattgcggtgatggtggccctgtcctctctgctagtgatcgtgtttattatcatagttttgtacatgttaaggtgagcctactaacacttcacattctcttagattctgtttcaatatcccagtgtcccaatgaacccacacagtccagtagacagtaggatatacacaatgaataggatagagggggaatgacccatgatagtgctaaaattgaagttctacttagaaattatttaaaagctctacatagtcttccttaagtcctaagccctccctctttcttccatctgtccaagcccagtctcccaactccagtgcaagctaaagcccagaatggtagtttggaggttgaggtaagaaaccgcagtttgttattagtgacaggtgttacaggatctctaggtctagccctgctgaagcaacccctaaaagggccccagtaagattacatgctcaacaaaagcctactgtatttctggctggggctttgtccccagacccttctgggacccctggccctggcatgttgagttgagccatgtgagttgtgagttacaggatccctctttctaaccttctttcagggtcctctagacgttaccactcaagcagaagcaaggaaggggaacccaagggagagaagagggtggtgcatttattctcttcctgctaaagctactgccctgactaattggatttagccctgccttatctttggcctaaccaaagatgttctgtgctccctctgttcttctgcagggataaagagagaggaatcatgtgccccctataatttgtcatgtgtctctatcattctgcaggagacttgtggccaggactgtgtccacccaatccaaagctctgggcttctccctgggtctcccaggctacactgaggaaataccaagatttttgtttgatatatattgtctgtctcccccagctgtattccacccactcaccctctctctacctggtgtggctgtgctctgcagtgagccacatgagcctgaatatactgttggggttccctggttggattccagtgtgccaagggtaaacaggagtatcccgaggtactcggtcaccccagcatgctgctgcctcagggtgtgcatgacctgtctctaaaaaagcccgattatttttaaaggcgatttagaaaggctgaattgatgagcaggaatacagaggtgtgatttgcctctcccacctctgtgctccattcttcactgtgatcattttctcattaggtttaagaaatacaagcaagctgggagccattccaattctttccgcttatccaacggccgcactgaggatgtgggtaaggcattccttaatgtcatggggaaccttcacaaggaaggaaatcaagaaattaggagtttctccatccttttaaaagaataagacaataaaaagaggaaaaaagatttttgaagaaaacagtcctagttcttacaggcttggtccatgaggtagaaccccgtttagcctccagaagaggggctaggttctcagggtacctgactgaccttctcccttgtgtactgcagagccccagagtgtgccacttctggccagatccccaagcaccaacaggaaatacccacccctgcccgtggacaagctggaagaggaaattaaccggagaatggcagacgacaataagctcttcagggaggaattcaacgtgagtactttgttgaggctggtgtatcagcagggaagaaggcagacctaaagtcagacctttcagatctttggagtcatgaagtaaaaaatgggcttttaatgtttaagaggtgagaaatgttttaccaagtttatctgactccctgtatgatcatggataggaaatgaagtgagatttgcctcacctccctaatctacccatccattcagtcatcatcacatctcttacttcttttgtttaataaatacttagcaagcatctaatatttgtcaggtaatattctagttgccagtgatatgatgaggagcagaaacagatccaatccctattctcaaggaactcactgtccaggagggaaacctcacaaacaagaacaaatataactgtgtaagttcaaacagcagtacagcacatgaaggactggtgcatatttgtaggcatccatattaagaggttgcctttttgagtctagagcaggggtgtcagtgtttaaagtagacagtgggatagatcagtgtgggaaatgacgaccatgggagactgcagagcacaggtctcatcttgagtatttagattcacattttttataattcccacaaggaagcagaatatgtttttaatccaccagttggtgatcctagcctaccagttctgatcccagatcagaagagcttctggccagcacggtgactcacgcctgtaatcccaacactttgggaggctgaggcgggcacatcacgaggtcaagagatagagaccatcctggctgacttggtgaaaccctgtctctactaaaaatacaaaaattagctgggcgtggtggcatgtgcctgtagtcccagctactcaggaggctgaggcaggagaatcgcttgaacccaggaggcggaggttgcagtgagccaaggtcacgccactgcactctgacctggcgacagagcgagactccatctcaaaaaaacaagagcttcctcgaataaatgatattttaattgatacctaatcataggcaagggtggtggggacaggggattggggagccttccagccactggaaatagcaggagaattgtcaggagtgagtgtgctgaaggagggcacacccagaacatgacagggctgtgtgcagctgaagaccagagcttcaaaggaggataagaggtgaaactagtgtggccagaccacagaccttgcagatagtcatgagagaagtggcaagccatagagcagccagatttacatcttgaaaaaatgactcagctgggcacggtggctcacgcctgtaatcccagcactttgggaggccaaggcgggcggatcacaaggtcaggagatcgagaccatcctggctaacacagtgaaaccctgtctctactaaaaatacaaaaaattagctgggcatggtggtgggcacctatagttgcagctactctggaggctgaggcaggagaatggtcagaacccgggaggcggagcttgcagtgagccgagatcatgctactgcactgcagcctgggcaacagagggagaccccatctcaaaaaaaagaaaaaatgactctggcttctgtaaggagaatagcccatgggcagaccagaatagttgcgggaatacagttaggggttacaggtgttaatatcagaagtgctagtagattgacctaatgtcatgactaggaaatgggggatggatttaaggacacagaggagcagttccagagttggtaaatacatcagctggggcattgctaaaccatcagtttccttcacaactttccactaagccatgtgtcagctttgccttataggctggctccttttttatcagtgggaaaaattttcccaaaagcttctggagacttctcttgtcacatgctccttcttaaaccggtcgtgagcaagggagaaaataaggttactgtggttggctgagactagtccagattactcctgggtcaaggccaggcatgctagctcacacctataatcccaacactttgagaggctgaggcaggcagattgccttgatcacaggagttcgaaaccagcctgagcaacatggtgaaaccccatctctacaacaacaacaacaacaaaatacaaaaattagctgagcatagtggtacatgcctgcagtctcagctacttgggagatgaggtgggagtatcgcttgagcctgcggggtggaggttgcagtgagtcagattcactccactgcaccccagcctggacaacagagccagatcctgtctcaagaaaaaattttttttagatattcatgtgggatatggatggataacctcacagaataggaggtctggtaaaggaggaatggttattgggtcagtgggtcaccattcatatctgctccatgacagaagggcttagggggagtggtgagtgatgtcagatttgcattttgagaaaataactaactacaatatagagaatagataaaagggagaggcaagagttgaagtgggagaccatttaccaggcaagagttaacagaatagcttggaccctttttgggggctattggaaaaatagcaccatttaatgttcattattgattgataagatttaccacatcctgccaggcacagtggctcacacctgtaatcccagcactttgggaggccaagccaggcagatcacctgaagccaggagttcaagactagcctggctaacatggggcaatcccatcccatctctactaaaaatacaaaaattagccaggcgtggtggcacgtgcctgtaatcccagctacttggaagtctgaggctgaggcaggagaattgcttgaacctgggaggcggaggttgcagtgagccaaggtcgtgccattgcactccagcctgggcgacaagagtgaaactccatctcaaaaaaaaaaaaaaaaaatttaccacatctcacaagacagcactccagcctcagtaccatagctggatctgtgctaggcattgtactgttttgtaatctataatgccaactgcttctgggtgatggggtatgtgatcccattactatactttttttctgacaaattagttcttttctttttccataacattaaatttacataagcatgaaacgaattatttgtttggaggtaatattccctgagactccatggtaaggtatttcagtaaatccctggatggtgatggtattcctggaggcatgacaggtaaattcggatagatattgtggtgagagccatttgctgtgctaccatggcaaccgtgttcacgagctcattgggccagcactagggtagtgagggaaagggctgaccatcatcacctgggtttctagcaatgagtgccatcttgtgagcattcacatggaacataaatattttctttcttgtgctagttatccactacccagcgattggtttagatcctgacttccagtgagataagtggtgtgataatttgcttgaagttctcttcactaggagaatttctcttttatacacattcaaagccatcacttaagtagtataccccatagcagtctacttccagcccagcatgggccagcatgtttcaccaagcagtttatataccaggccggactttttcttcttcagttaactgttgatgtcaataggaagtcagaagtatctattgcggcagtgggttgtgtggtaggcattttatagagatcacttccagctgataatgggattctgctgggcatgtccaaatctatggctaattgaatctcataatacctagtttacgagaccggcccggtggctcatgcctgtaatccctgcactttgagaggctgagttggacagatcacctgaggtcagaagttcaagaccagcctggccaacatggtgaaaccccgtctctactaaaaatacaaaaattagccaggcatggtggcaaatgcctgtaatcccagctactcgggaggttgaggcaggagaatcgcttgaacccgggaggcagaggttgcattgagccgagaccacgccattgcactgtagcctgggcgacaagagcgaaactccatctcaaaaaaacaaaacaaacaaaaaaacccctagtttacgatggggagttgaagtcatttggatacctgtctgtgatcaggcttgcagtctctaccctagagcccagtactaggctaggagcatggtcttaccaataggatcatggtcttatatccatatccaaatattacgattcttctgtttaccttactacaaacactctagagctccatacaatctaccagagcttatttctctgtggcctggatcagcaggagcactttctcttttcagatcactcaataaattggtcagaggctgggcacagtggctcatgcctttaatcctcgcactttgggagatgaggcaggcagattgctttgagtccaggagctcaagaccagcctgggcaacatggcgaaagcctgcctcttcaaaaaattagctgggcatggtggtatgcacccgtagttccagctactggggaggctgaggtggggtattgcttgagcctaggagtttgaggctgcagtgagctgtgattgcaccactgcactgcagcctgtgtgacagagcaagatcttgtctctatgtaggtaggtaggtagattgattgattgatcagatggattagatggattaaattgagagatcagagttggatgcaaggataaggtatctgctgtctccaaaactcaaaatggcccagcaagcattgctcctctttgttagcaggagaggggtggtggggcaaggggcaacaagttgtcttttatgttggaggagataccctgacgtgctgcaggcctttgactttcagaaaatttggctgaggtggcaggccactgtatttttatgtctgacatgtacatctaagatacataacttcctgcttttcatgtctcacattgatgtcattagcatagttgtcaaggtaatgtcctgtgaaacagacaaaatcttgatgaaccagatcacaacacagaaaggtcaagatgatttatcactgaggctgctcttgccatgagcaagaaaaactgcttcaagtagtccacacaacttaaaaagaacacacacttacccctagcagtagtctaggtaccaggagttatatgttaatctgcagaaagtagagtacgtctggaaaagtaactgcaaatctgcaaagtcttctgtagcacttaagatcctgcggttcacatggagacttcgccttttgctaaagagatcactgctctaggagcttacatttgctctttctgtgatggttcttatccagtgggctagggaatctgtgtgtctttgggcattacctaatggccaatgttattgaaaatcaaggtggcacagagggaggtctagccaacttcacagagccgggagcatctagtttctttccctcccttttggaggccctgacagacaggcaggcaggcagacagacagatcgacagacaggtaagatagattagatagattaataggtcctaatgtgaagccacctcaggccaaaattccttccatcagctggcctgcaaaggctccgttctaactagcatatcttagcgacattctgagttcctagcaagtagctacctcaaggccaggacctagcagaccccaaaagatgcatttccctttacctagtacagttgccatggcaaatatctgcagattattaagaaaagatgaggagggaggtttataatatatgtgtgttaatgcgctgtggcagggttcctccttacagatgcctggcctccctgttattgaagggttctgggtctgaaatgacccaggcctacgagttggatgagggggccccctctctagcatggtggtctagtaggctgcctaaactgacctggaaagctactttccgtttccattactgggagcttcacaatgaattattcacagccataaacgtctgatcatggtctccaacagtctttctagcccacttagatcaggaatcccattttgaaatagtcccttccactagcatctcacgctgctgaggacagccaggaaagcacttctgaaagattccagtgctttcctcaccagtgtatagcctcagcaaggcatgtgatgtggatcccatcaagggcatactgaaggtgtcagtagaaggctgagcctttagagtccatatgccactctggtctcctctactttgtgcccaggtttttctggcttttcattatcacctcactaaatccagcattcagtccaggtttccactggcgagcctagctcaacattaaaaccatggccagttacctgagctgttacactacctgcagaagttcttttgaccataccataattagaaatttggctttatccaggctgggcacaatggctcatgcctgtaatcccagaactttgggaggctgaggcaggcagatcacttgaggtcaggagtttgagaccagcctgaccaacatgctgaaaccctgtctctactaaaaatacaaaaattagccgggcatggtggtgagtgcctgtaatcccagctactcgggaggctgaggcaggagaatcgcttgaacccgggaggcagaggttgcagtgagccaagattgcaccactgctctccagcctgggggacagaacaagactccatctcaaaaaagaaaagaaatttggctttaaccaagtcatactctcccttccttgttataacgtctccaaaatctatatcaacaattgttcctatcatttgtaatgatccagctcagtgaattcctgtagtttcttctggatatttattagctctttactttttttcccccgctgtagagacggggtcttgttgtgttgcccaggctggtcttgaactcctgatctcaagcagtcctcccaccttggtctcccagagtgctgggattacaggcatgagctactgtgcctggccagcattttacttttctaccttatttatgcattttaccctcaggtcatgttatgcttgcattctggtaatgtgtgggcaatgcaggctgggttgtggggcagttttcatcatgacagcaagatgcagtagagagcataatagagatttttggaaattaactttctttgggtcctctcttttatcatcatttctgttgtctcacttaaagccttatctttctcatgagcaacccaggaaagatgtgaattctgtggcattaaaattcagcaactcgcaaaatttggaaaccttaacatttcacttagcaaaatacatatatagtaatgtaaaggccctgagtcttgggttttcatttcaaggtgagcatttgatattggagctgggttatttcttgttttgttctctaatattgtcagaagtaatcctactccttggtttcaacatttcccctctccttttaattgggacacccctactcgtttaccaccagcttgaacacatcacaggtaattgcaagcaataactaaaatagtagttgtgcagctatgaactgtgagcagcttgctctttcccatcctggcaattggttgtcagtttctttccttccatctgaacccagtaacatcacccacgtttcccctagcagtctctcaactacaacccactctgatagtaattgctaaatcagttaaggtcctctagttaaaagcaagagaagtcacctcaactaaattaagcaaaaacaaacagaactattgatttgggaagacactggaggagctggcagaatcagaaggtaagttggagtaccaagtctcaggtagagccgaccttggtggctttggggcccttctagggaagcccctgcttcttcctagttttcaaaatcctgggagagaatctgattggctcagtatcagtcaggtatgactgtgtttggatcagtcagccctgggagagaagaggagaaataacacatagggcaaacaaaccaatttgtgtctactgtcatagaataatatttttagtaaccatcagatggggaaggcctttctaagctacttagaagatttagatgccagaatggaaaagtttgaaagatagcaaatatattaaaatgtgaaacatctttgtgacaaatgatgtcgtaaaaaagtggccaactgggagaatctatttgccataggtagacaaagaatgttccagaatatacaaacctgtgagtaaaaggtaaacaatccagtcaagaaactggcaatttacagaagaaatacagatggtctataaagatatgaaaagaagatcaactatatctagtaatcagggaaatacagattaaagctaaccattattttggacctatcagatttgaaaatttaaaaagctttatatcaaatgtggacaaaagtatggggctgcagagacttacaggtgggggagtttaaattggtattgcattggagggatgattctggcagtaccaatcattatttaaatgtttgagttttctgaccaagcttctgagattcttaacagaaaaagccatgtacaaagatgtttatgacagcattatttataatagcaaagaagataaaaacgcaaatatctgtcaaatagaatggccagatgatttcttatatccattatgatattctatactatcattaaaataaatgtgttcacatagatctctaagttatattgttatgtgagaaaacatatgtgggataatttcatttttgttttcaaaaatatgtatatctgtgtgtgtttgggtatgttaatgcttttttttttaagtctgaaagactacaaattgtcaacagtggctgcctacaagggggctggaagagaggagagacataatagggaactttgttttctactaaattatttgacttaaaacaagcatattctttttataatatttttaaagcagatttttttgaatatgggaaataaatctaatggacttagtttgcttcgatggatatataacatctagaataaagaagttcctatgcctagtttgaactgtgtcaggagtcttgtggtcaggtctctataaaaagggatatcaccaaatgggatgttgttctggagagaaactggaccatgggggtgaataactaaaggaacaacactcataggacatgacagctgttttcagatatgtgacaggctaaaaggagactgtagcatttccgtgaatgcccacctgattagaagttctaggctgtggctttcatcctaattacaagctggagcttttttgttcaccagcatttgtctttctaggaatcattgaatttattcaaaagaaatactttgaaaaaccactcagaagcccccattttcagggaaaattgaggtctttaaggcattatcaaggtttaaaaagaaacaaaaagataaaattgtgttagcttctggctgggtgcagttgttcatgcctgtaatctagcactttgggaagccaatgcgggaagattgaggccaggagtttaagaccagcctaggcaatgtagcaagaccttatctctacaaaacaattttttttaattagccaggcgtgatggcacatgcctgtagttctagctactcagggggctgaggtgggagaatcatttgagcccaacacttggaggctacagtgtgagctatagtgctaactttatagagctgcaggagctacagtgagctacagtgatcaccgcactgccctccagcctcctggctaccagagtgagactctgtctcaaaaaaaaaaaaaaaaaaaggcttagctcctgagaggaatgggataggagagaaagaaaagagggaaagaggtgaagccagtgaaatagtcagaatctgtgcgatgtgagatgtgaccttcctcaggacctcacatctcttagattgccaggtgaagaaggcatgtgtgtgtcactagtgatgggactgagtgtggcatctgagttgagatgggtgaaatcgcctctacattgatgagttgtcccaaaataagtgaatcagagtcacagtcctgtgggaattagcaggaactgtgacaagggctttggaattccactgtccagagagttgggagtttgcgttttgcaaggggcagaaaagatgcccgctgacatctgggttttacattgcttagtacgagggaaatgcaaaagaaattgtgtgtctgggtgttgggtcgttttaaacagaactgttccaagacctaccttggaaggtagtaaatttcccatcactctagtgttcagtcactggtgactattgggtgagagtattgaaaggagattcagacttaaaagtgaatgagattcagacctgtactggagatctaggcaagaaaagaaaggtataaggattgcaaaggaagggacaaaatataaatttttcacagaccaaatactgtcttcagaaaaacccacagattcatcagacatattatagaattaatatgacatattatattatagaattaataaatatgacatatttataatttattatatatgacatatttataattaataaatatgacattatagaattaatatgacatattatagaattaatattcatcagacatattatggaattagcaaggttgctagatacagaagcagcataaaaatttaatgcatttctatacataggccacaaacagaaaacctaataataccttttaaaaggtgccaattacaatagcatccaaatgtaaagtacctaggaatggatttaacaatttagagaaaattattaaaatgtttgaagacattaaaggaaaatagcttaaattagtgaagagataggatcaatggattaggaggctcaattttgtaaagatgtcaattctcccccaagatatatagattcaatgcaattccaataaaaatcccaacaggtttttttgtggaacttgacaagctgattctaaaatttatatggaggagaaaagattcaagaatagccaagacattcctgaagaagaagaacaaggtgaggagacctgccttaccagatataaagagattataaaattttagtaattaagacagttttgtattggcactgggatagacagatcgaccagtggaatgaaataaagagcccagaagcagatccatttgtaagtggaaacctatttatgacagaaatgctcttgcagtttgggtggggaaaagatggtcttcacaataaatagtgcctgggaccattggtaaccctgtgggaataaatgaaattgaatgcttgtcacatatcaaacacaaaaaccaattccagttgctgtaaacactgaaatttaaaggacaaaaatgataaaatgtagagatcataatgtagtaaaatatacttctgatctcacagtaggaaaggatttcttaagacttaaaatgttgataaaagggaagattgatgaatttacatgaaaatgcaaaacctctgttcataaatgataccataaagaagatgaaagggaaggccacaaccttggtaaaagataacacaggtaactgataaaggaagagtatccagaatatataaagaacttctacaaattgttaagaaaataagtaggctgggcgcagtggttcatgcctgtaatcccagcactttgggaggctgaggtaggcggatcacaaggtcaggagttcgagaccagcctggccaacacggtgagaccctgtctctacaaaaaaatacaaaaaaaattagccaggtgtggtggcgggcgcctgtaatcccagctacaggggaggctgaggaaggagaattgcttgaacacaggaggtggaggctgcagtgagccaagattgcgccactgcactccagtctgggtgacagaacaagactccattttgaaaaaaataatccagtaggacaacggggaaaccacttgactaggtacttcacggaagaggaaactcttttgaccagtatgctatggaaagatgatgaacctcattaataatcagagaaatgtaaatcagttaacacaaagtctgacagtagcaaatgttgataagcatacggaactggaacactacattgctggtgggagtataaattagtacaacttctttgaaaaacaatttggccttatctggtaaggttaaagatacctatacctgaaattcttgcacatatgcacaagaaagatacaaaaatgtgtctcaaagcaggacctttaactgtaaacaacccaaatattcatcagtagtagaatggataagtaaattttaacaccgtctcaaatggagcactacaaagtagctgaagttagcagccaggatgaatcttaggaacgtaatgttgagccaaagaaaaaagcaactcaccacttaatcatgattccattttcctcaaaaactagactagcaataataatacattgttttggatgtaaaaaatatgagatacaaataaaggaatgtaatgataattataaaacttcaggtttaccagtgagaggggaaggaagaggatataaggagaggagcccaaagagagcttctaagttaaattatgtgatggatactttttaaaaaataaatatcaacaaatgtgaaaaaaaaatttttttttaaccgacatgtctttaaaaaatgaatgagtacttagccttggttccagttaaggcttaaacaagagatgaaacggtcttcgatgccacctagtgtttctagagagtttaacattttatagacttctgctctagctgctccttcctagctctgtgagctaggtttttcagagtagaaaccaaaaggagtaggattcaccttgttttcatccgtgacgcaggctcttcattctgaacctttgcatctagcgctgtgttctccagggcaagccctttcttctctcttgttaaacaatggctcctgtttcttcctgactctttttaggagccttagtccacctggagacctagtttttctttatcatgactgagggagctagggatgctgatagggctgtgagatgtagtctttgttattcctgacatttttgtattgaagactgttttcaagagtcttgctgtccctacgtctgttctacattttagagaagggatgcacaggaaaactagtgcctctggattagccatcagggcttaaaaaactgacatctcatcctgccctgtacttgggtggaaacctgtggaaatcttatgtgaaggaagagaatgcaaactgtgggtgaactgagaaattctgatctaaaataatggtctctactgcgtgtgtaagagtccagcccaggaaaatcttttcttccttttgtggtattcacagcatagggtcaggggtaattgcctctgttagtaaaataacatgcagaacctccagggttttaatctgaaaggaaatctcttgagtaggtgagggcagatggattttgaggtcctaatttccctatctttgggtctttcactttaatttctcctatcactgtcatgctggtttccagtaaatatatttgctcctttcttaaagctcttgcttcccagcctgggcaacatagcaagatccacctctacaaaaataaaaattaaaaaattagccaggcatggtggtgctgtgcctgtagtcccagttactcaggaggctgaggcagtaggatacctccagcccaggagttcaaggctgcaatgagctatgatggcgccactgcactccagcctgggtgacagagcgagaccctgtctccaaaaaaaaacaacaaaaaactcttgcttccatctgacaaaaaattggttccctttgggttggcatttcctttattcagtctttttttaaattattatcaaagacagaaacgttcattcttcatttctgcctcttgctcttcccagtccacttttgccttcattccatctccaaatgtagtaatttttttttttttttttttttgagacagagttttgctctttctgcccaggctggagtgcaatggcgcagtcttggctcactgcaacctccatctcccgggttcaagcagttctcctacctcagcctcccaagtagctggggttacaggcatgtgccaccatacctggctaattttttgtatttttagtagagatggggtttcaccatgttggtcagctggtctcgaacaccagacctcaaatgatccacccgcctcggcctcccaaagtgctgggattacaggcgtgagccaccgcgcctggcccaaatgtagtaattctaattccagaatatgtctcaaatgcatccatttccttgtatcatcatttttccatgcttctcttcttgctcctctctagtccattttccatacaataacaagtaattctttaacatggaaaatggatcacactttaaaaaccttcaatgatttccttatgcacttaacataaaatttgaactccctattcaaggacctacctggaaatggatgatctgactttgccaggctcatctcttcctacttcctcctgccatccccatcaacctcaccttctgcgtgatacctgcactgattttcggttcctcacacaaccaagccttcttccacctctgggttaccacagatgctgttctctgtgtctggaatactattttctatactcatccttcctcagagagacccacctgtaatccaaatttggtgctttctgatacttcatctctagtagcattctgttctttgattgcattcatcatggtatataattatatatgtatttgttttatttgtttaatgtctgcttttcacccacaagtttatattgtccttgagggcgagaactgcacttatatttgattccccactctttgctctgtatctagcccagtgcctggtaggtacaaaatatatatttgttgaaagaatgaatgaaaagtaatgcatgaattgttcctctactgctgaatactacggttgttctcagttttgggtcattctaaataatgatgaagtaaataattaggacataaagatttttatttcctaagggtatgttctcaaaattgaagttgctaggccaaaaagtatttttgaaaagtttttttaaggctcataaaatgtaatttccaagtcacttactcggaattagtgttggaattttaaagtgcctccctttttgctttcttgtttgtttttatagtgtcagagtctcactgtgtcactcaggctggagtgcagtggtataatcatggccttgaactcctgggctgaagtgttcctcccacctcagccttctgagtagctgggactacaggcatgcaccaccatacctggctatttttttttttttttttttttttaatgtagagacgaggtcttgctgtgttgcccaggctggtctcaaacttctggcctcaagtagtcctcccacctctacctcccaaagtgctgggattacaggcatgagccaccacacccagctccttttttcatccttaattttgaatatatgaaacatacaagaggagaacagatcaaataataaaatttagcttcccactctgataaaactcatttatttgaatacttattctttgctacacatgagattatttccttatgtggcagatgttgttgttccaattttatgtatttatttattatttatttttgagacggagtctcgctctgtcgcctaggctggagtacaatggcgtgatcttggctcactgcaacctccacctcccaggttcaagcgattctcctgcctcagcctcctgagtagctggggttacaggtgtgcaccaccatacccagctaattgttgtctttttagtagagacagggtttcgccttgttagccaggctggtctcgaactcctgacctcaggtgatccacccgcctcagcctcccaaagtgctgggattacaggcgtgagccacttcacccggccccaattttacagatgaggaaactggacctagaaattttaacagatgtgctcaagttcatacaaacacagactatctcatgtcagatcattgtgtgataacctccctgcactaactaatctacatttgctccagaactgctgcaaatttaatgtcacctcacccaaatcttctgcttcttaactgctgcatctatatgaatgccctcccacccacccaccagtccttgcttccttgccacatgatgctagaggctggggtgccatgcccccttagatccctaggaagagattaaatcagctggccatccagaaccttcctgtgtggttcactctgagatgcatgtcatctttgtgtggtggtaattagcatgaggataaatggcccattccttcaggtatgtccccattccaatttacaagggtaggcccttttggcccagtatcataacaacaggctgctaaccacatagtaatcatggaaagagcatgctatacttacataacagaaagggcattctgccccctgaggattcttgtgttgttgaactctaaggagcttgtggctgtttcgggggagaggagcattctctgtgttaggctgcaggtattcacctgggcccatgtttttccccccaggaaaaggtagaacatgctaccaggtcagggtttggtgcagcagtttgcatgtttgatgtttatccctgctaataattcctctaatttctcttaacctttcaggctctccctgcatgtcctatccaggccacctgtgaggctgcttccaaggaggaaaacaaggaaaaaaatcgatatgtaaacatcttgccttgtgagtgtctttagtgtttcttgggatgtaacctgaaattacatctctggagggattttctgaagatggaaagaatcttgcaattgggcacagcagggtgaataacaagagtgcgttcatggcagtactcagtggctcatacctgtaatcccagaactttggaaggccaaggtgggagaatctcttgagcccaggagtttgaaactagcctgggcaatatagtgagacctcatctctacaaaaaccttaaaaaattagccaggcatggtggtgtgtgtctgtcgtcccagctactcaggaggctgaggtaggaggatcccttgagcccaggggggcagaggttgcagtgacccaagatcgtgtcactgcattctagcctgggtgacagggcaagaccgtgtctcaaaaaaataaagtaaaagaaatgaaataaataataataaataagataaataaataagagtaggttgaagactttgggctgaaagagcctttatggatcccacatactcagagtcaattaggatgatccaggaggatttttgtgtcaggcctaaagtttctaggaggtcctggagaacagcttcactaggatcaggcaggaagcagggggtaatggtggtggtagagatggttttttgtggtattcattgaaagaaattctaatgcagagttctctgtataaacccttcccagagttagccattgctaatcagttgatccataagctaacagacatttttctagtccattggtatccagaatgggatatgcataatttaatgagatatgagaggaagatgtttgaacctcacttgatttttatatttgcttttcaaaaaaaaaaaattcctaatcctcagaacctgtgaaaatgttttttttttaattttttgtagagatggtcttgctgtgttgccttggctgatctcaaactcctggcctcaaacagtcctcctgctttggtctcccaagtgttgggattacaagcatgagccagtgagcccagccagtatatttgccttttaaaaattcatccttttaaattttttatttcatttatttttttagagacagggccacccaagctggggtgcaatgatgtgatcatagatatgtatcctcgaattcctgggctcaagtaatcctcctgccacagcctgctgagtaactagaactacaggtgcatctaccatgcctggctgattattttttagacacagggtcttgctgtgttacccagcctggtctcaaactcttggcctcaagcagtcctcccactttgacctcccaaagaattgggattacgtgcatgagccaccacatctagaccctaaaaattttatatttcagggtatatcatacattagcatatgtgcataatttatcaataaatgagcatgtattagagatgcctgctcacatttttataagtgaagtatggaaccaaaaaattaggaccactacactatgcatttacagatacttttgtctttttcttttttctttctcgctctgtcacccaggctggagtgcagtggcacgatcttggctcactgcaggctctacctcctgggttcaagccattttcctgcttcagcctcccaagtagctgggactacctataggcacatgccaccacacccagctaattttgtatttttagtagagacggagtttcaccatgttggccaggctggtctggaactcctgacctcaagtgatgcaccgcctctgcctcctgaagtgctaggattataggcgtgacccaccatgctcggccttgtcttcttatttatgtgcacatgttggaggagggggatgtgtgtatgtgtgtgggtgtgggtatgtgtatatataatacatattttttaatatgattggtatactgtacacatttctctcttttaatagtatatattgtcagttcatctgtcaagaaactttcttttttctcaactacttagtattccacattgtagatgcatcttaatttatttaactagtcccctaatgatacttaaggtattcccaattttttgctgttatactgttggagttatattgttggagtggcatctttatacaagcgtgagtctgtgcacataggcacagatgtctcaactgtcctggttgcgtcaggttctgtgagaaataaattttgattttactgaaatattgttggtttgtttcctagatgaccactctagagtccacctgacaccggttgaaggggttccagattctgattacatcaatgcttcattcatcaacgtaaggatcgggtgctttccctgtcacttccctgcctgaccattgccactatctgttggctcctccccagctgtgtgttaggagaaatatttgtcatttcatgttttccctgacaagtctggtttttttaagtgactgaatttttttttaaggtcagtcaaatagttttaatcattttctatatttaccctgtcgtcattccctatggtttcccatgtagaaatctgtgtctaaatatgtattttgtgataagagtcagtgaatcctttattgagctgattctaattacaaacaaaagcaggccttgccctcaacagtaaaaataagggagaacaggacaagaatacctgacatgacaccagctatattatatatgtgtgtgtatgtatatatgtgtgtgtgtgtgtctgtgtgtgtgtatatatatatatatatgactatctggttagccatatatgaaccaaggcctgagggaagagctgatactaagaggaggtttttaaagatgatttagagaatgtttatagaacagtctgtatgagagatttgaggtttttgtttggttggttttgtctttggcagtagcctgaaaaaacacataaagagttaagaatatgttttataggtttgggggaagcatcctgtagagagagtgaatttgaacagaaaaaagagagagggaaagctggcaaaagcaagtctgactcctgatgcaaaatgcatgagaagactggataaaatttccacttgcatgtttatagcagcattaatcctaaaagccaggtgggagcactccaagtgtccattgacggatgagtgaataaattaaatgtggtacatgcatacagtggaatgttattcagcctttaaaaggaaggaaattctaatacatgctacaacatggatgaacctggaagacatcatggtaagtgaaataagccagtcacaaaaggacaaatattgtatgattctacatatagaatataaactatatatacatatgtagagtagtcaaattcacagggacagaaagtagaatagtggttgctgggggagggaggaatgaggagtgggtacagagtttcatctggggaagatgaaaaagttctgtagacggatggtggtgatggttgcacgacagcgtgaatatacttaatgctacagaactgtacacttaaaatggctaaaatcagccgggcacggtggcacacctgtaatctcagcactttgggaggccaaggcggtggatcacttgaggtcagaagtttgagaccagcctgaccaagatggtgaaacctcatctctactaaaaaaaaaaaaaaaacaaaaaaaaaaaaaacaacttagccgggcgtggtggcaggcgcctgtaatcccagctacttgggagattgaggcagagaattgcttgaacccgggaggcggaggttgcagtgagccgagatggcgccactgcactccagcctgggcgacagggtgagactgtctcaaaaaaaaagaagagtcaaaatggctaaaatcgtaaattttatgttgtattttaccacaagaaaaaaaaaggacactgatggagagattagtgtgaacataagaagggctgtttcttcctctgagagtgaagataaaggagaggacagaatggatagagacgactcgtaggtgtgggtaaagcaagttgaggcaactcacccgtgtgctcatggttgtgtactgaacaaatgagatgggactgtgacatgagagcttcgaaagtttagaacagcttctgaggtccctgagaaaaggataccaaagagagaaagcaaaggacatgtctagtgggatgtcattgatgggggtggggggtgctgagttgtgtgattttttttttcttcatctgcaccctgggattggtggtaaatgcagaggacatgtggtactcagacaaaagggaaggtcagtggctgcttcaagtagtcagccaagggcttcagtttcagtagaaaagaaaagcgttaggaagttgttaggaataaacaactattcctaaggtggtaggattgaggaactggagatcttgagaaagtgaaagaacaggaggttgtgtccaaaaaataggctattagatggacttcaaaaatggggcagtccgggcattctcactggagtgaatttgctgaagttcctgtatgtatgtttaacattaatggttacatgtttgtagttttaaggaaagggaccctgactagacaaataattgttgtagtcgataaggaaaatggagaaaggctagtaatcagcaggaattcctagaacttacatcgaagatcatgatgaagagattaggtggaataggttgactttaatgttatgcagaagagaagagcaagatcagttagtgtgtccagctgcgggtaagagaatactcaactaaaagttgtctagatgggaacattttttttttttctggagacagtctcaccccgacacccaggctggattgcactggtacgatcttggcttactacgacctctgcctcccgggctcaagcgattctcatgccttagcctccctagtagccaggattacagacatgtgccaccatgcccagctaattttttgtatttttagtagagacggtgttttgctatgctggccaggctggtcttgaactctgagcctcaagtgatccacctgcctctgcctcccaaagtgctgggattacaggcgtgagccaccgtgcccagctggaacatttatttgtctcatatactgtgaaagcaaatggagaccagttcttgagttggctgattccatgggtcagtgacatacttacaaaaccaggtgcttccatctttctactcagttatccttagccctgtcaacagtctcatggccacaagatggctgcagcagtcccaagcattcctcataaacacagcatccagccgggtgcggtggctcacgcctgtaatcccagcactttgggaggccgaggcgggcggatcacaaggtcaggagatcgagaccatcctggctaacacggtgaaaccccgtctctactaaaaatacaaaaaattagtcgggcgtggtggcgggcacctgtagtcccagctacttgggaggctgaggcaggagaacggcgtgaacctgggaggcggagcttgcagtgagccgagatcacgccaccgcactccagcctgggcgacagagcgagactctgtctcaaaaaaaataaataaataaaaaataaaaaaaataaacacagcatccagcacagaagaggaacatatctgcctatgcttttctctctgttagggagcaaggcttttcacggaatcctccccaccaccctgtcctcaggaccagcaggccaggattggatcacatgttcacatccctctctaatcactggctaggacattgagaatgatcatgatttacccctctgagcctggggaatgggcaccttccaagccagtgaaaggttaatgtccaaacaaaattgtggctctaatggcaaagaagaaagggaggaatggatttgagttagtaaccagcagcatctgccaccgtaaccagtttggtcccttcccacattgaaggtgaaaactgacaaaagttaattgtatgttaaggctgttaagcagctgagatggggatctcttcatggtaatggcacagtagaaagaaacagccttatcccttgaccatgtttatttagagcttacactagggcattccataatgccttgatggttattagacagttattagtaggcagagtttacatgaagagggttaaatgggggaccttatgaactcagtgaaggaacaaaagcagggaaaaacctgtggttaaccataagtgggaagcagggattaaagatttggatttcacagtttattaaactcagtcaacattttttgagcacctgctgtgtgccaagcactgtgggtaggcttaaaggttacagaggtaagatgtaatccctcatatactacacaggtagttaggttgtttcctgtaatgtgctacgtgtgcaaaggaggtattgccaggttctgtggagttatgagaaaaaacattcagcccagcctggtaacccagtagagctcattattgaagagtgagtcagagttcaggagaagaaagttgggcagaaacttcaaagcaaaggagaaacatgagcaaagtcacagagactagaaacagcagtcttaggttataaggtataagatgggaagtggtgggaaatgagacttgatcttgaaaggtagtggatgtcaagtgtgtccattggagttcttacttgcagactatagagtgtacttttcatccactcttttaagcagaaaggggtttattataagatactgggtaccttaacaaaacctggggaagagccagtgagccaagctcagatgctgctcagcaaagagcagagcagctatagatctatgcagcatgtgactgtcatagtgaaacctctgcacagtgctgcagaagaactggatgcttctactaccgtgcttgcccaaagaccagatttctagcacagtcgttatctcatgttgctcatttctaccccaagtcttgtgtgggagcatctgctaggaagaagctaggtctcgtggattgctgagctgctagggagtctgggaaatgtagctgtaagatagtcaagctagaagggagcaggagtgggtactaagtgaaccacctaatagtgtctgccagttttcagtacagctgagcggttttgatgaatttatctaggccgtggggtaccattgaaaagtgttcaaggcagggagtagtgtgaccacatttacatattgatcactggggctatcatgtacaacatggatttaggaggggccaattgggggctattgcaatagcaggtagatcacaaatgatgagggttgacaaggaagcggcgacaaagtgaaaactacgtggaggtagaatttagcaggaattggtggttgatttatatatgagagagtagagggtgatatatccatgtagatgtatccagcatacagttggtcatatctagagctgtggacttggaagtaataaaggagtgggccaagaacagagcccttgggcccacagcccctgccaggcacattgaacaggtgctcatgggtgagatggaaggagaccaagagaagagagcatctgagaaggcaaagataaagcatggctcaggaagtgtttggcagtgaagagggttatgtgcagattagagatcagtgggaaagaggaacagattttctttggacttagtgtgtagggcagcatcctttgctgaagcaaattcagaggccgtttgttgcatcctttttgtgggctgctagttaacacttatcaaaccctttttttcccctaacattgaggtataatatatataacataaaattcacccattttaagtgagaattcagtgattttttggtaagtttaccaagttatgcagccatcaccataaatgtcttagaacattttctaacaactttattgagatgtaattcaaataccatgtatttcacccagagtttacaattcagtgtttttttaagtatattcacatataactgcagcccatcaccaattttagaacattgtcatcccctcaaaagaagaaccttacactctagctgttgcccccttagttttagaacacattgctcaccccaaaaagaacctcagtgtctaaatacaattaatctccattctcaccccccggccatcacttaactttttgcgtagagaactgagaccacacacatggatcttgaagggaactaggcaccatggagtagtggtgaaaggcctaggaaagtggggtctgtagtttgggaaacacataggtcagctaacctaacactgttcacaggaggagatgaaacagaggcagtggcacagttggcaggtgggcttccagcctagagccttaggagaaaccagtttccttactcatttttagatgtctaagaatatataggatttttttttttttttgagacggaatttcactcttgttgcccaggctggagtgcaatggcgcgatctcactacaacctctgcatccggggttcaagcaattctcctgcctcagcctcccaagtagctgagattacaggcatgcaccaccacacctgctaattttgtatttttagtagagatggggtttctccatgttggtcatgctggcctcaaactccctacctcaggtgatctgcccacctcggcctcccaaagtgttgggattagaggcatgagccaccgcgcccagcctagaatatataggatctttagacgtgtttctttttagaggtaggaatgtagctaccacctagagcccactgagattcagctttcagaatctagagacatctcaggagccagggagccacatttcatctttcccttgaacagaacacaagatcagtggctttgcttcattctcattactctgtattagttaagcagtgccgccacatcactgtacaagcatgttttcaggaaggcatatgacgcactcctggtaagatggggcaggaagcactttggggctgggccttccaaccaggtgttcaggctgttcagggcccgcatgctgcaatgagaatttagcagtgactcctcatggagcaggaatatgatgcgcttaacgtattcttaaggacttctcagttttaattataagtttagtaatataagcagaatttaacatccagaattaaggctatttccatttccattctctaataaataaaaacatttgttgaaacttaaattgctcttctcaatgaaaactttaacaagtcttttgttgctgactaaacatatccatctctgaggcctaaagctttctccttctgtgttgggcagcaaccctgccctgcccttgtttgaactgaaattgaaagtggctcctcagaccaggcacggtggctcacacctgtaatcccagtactttgggaggccaaggtgggcggatcatctgagttcaggaattcgagagcagcgtggccaacatggtgaaaccccatctctaatttttgtaaaaatacaaaaattagccggccgtgatggctcatgcttgtgatcccagctccttgggaagctgaggcaggagaatcacttgaacccgggagcagaaggttgccgtgagccaagatcgcaccactgcactccagcctgggtgacagagcaagactccgtctcaaaaaaaaaaagaaagtggctcctcagatttaggccacttcttatatttggccactgccttgcagccttgtagttcacattgccaccctggtgttggtgtgacatggtgtcccatccctgaagctgcctcccttgttactcaccttattgctgtctgagaaaggaaatgggtgattcacaatccttaaatcaagtggctttctcttacctagaacttctgaattgaacatacatttaaacaatgacgttgaaaagatgtataactggagcaataaagactgaaaaagaaagctgcggccagttgttagtttttccgaggctccttatctgttgagtggcaccccaggctcccttgctcttgtcccccactgcctgtgatagagaagcctcttgttaaacactgggagctacttcaccacactcacaggctattcccagaaagattttgcacctgggtaaagcatccttgagaaaataacctgttttctttcccagagtgaacccagcttcatccctggaaccaccacatatgcttttcccctggtgggttcttaacctgttaacactgaaatctacattgttagctgctgataaagcatcagaaacatggtctaatctgggagtcagtatttggatttcttttttctttctttctttttcttttttttttttttttggagatggagtcttgctctgtcaccaaggctggagtgcagtggcgcaatcttggcttggctcagtgcaacctccacctcccaggttcaagcaattctcttgccttagccaccctagtagctggaattacaggagtgcaccaccacgcccggctaatttttgtattttagtagagatggggtttcaccatgttggccccatgctctcacactcttgaccttagatgatccgcccaccttggcctctcaaagttctgggattacaggtgtgagctaccacgcctggcctggatttcttattctagtatttattaataattcaatttgagaagactacctagactatttgagttttgtaatctctaattcctagctctaaagctaatcccttgtgaatatctagactggaaatccccgttaagtacctgcacattttcaggttttgttaactggttggagtcagactggagaatttcatttctattcatttttggttttctctttctttttctttccttccccacaccccagggctaccaagaaaagaacaaattcattgctgcacaaggtaaagtaatgacaacttttttctgttagatttaaccatgatcacataatgggtttggtttttttctcccaaatgctgagtggattaaccagaatgctgtagcttttctgtactttttaccacctgaaagaattataatccattatacaggtttacagctaacagccttcatcttgatgacttagtatccagggatccattaaaagaagtctttttgtgtatgtatattaaaaagactggaaaaggctgtatacacaaaacacagtctaataaggccctctgtccttggggctagttaaccttaggttccagccaggctgctcagagtttgaattaggaatcagtttccagagaggatcagccacctcacagggtccaggctggttctcccccagctcatgggcctgagcctcaccattattcacagatagttggtctaggaaccctcagatcagggacccagcaccatgtcctttatgtgttctacacacatttccaggcctgctgttctaacaactgtcttcactctttgaaccctagcaaaaatatctggatgtttgcagcattaaaaagtaattgaggccgggcagggtggctcatgcctgtaatcctaacactttgggaggccaagacaggaggatcgtttgagcccaggagttcaagatcagcctgggcaacatagtgaaaccccgtctctactaaaaattagccaggcgtggtggcacacacctgtgatcccagctacttgggaggctgaggcacaagaatcacatgaacccgggagccagaggttgcagtgagctgagattgcactactgtactccagcctgggtgacagagtgagactttgtctcaagaaaaagagtcattagggactacaagatttataaaaacaaagttctcctcccttttcttttcacttttttagtctaatgcccctggggcaaccatttttatctattggcttcttatgatagatgacatcatctgatccccttacagagcacctccccctcagtcagacagacgtgtacccacatatcctccccattctcccagaagagtcaaatcacaatttggggttaaggtatttattattattatgagtttacaaatattcacagccgaaacacacagtattatgttattttttgtatagtttttttcccccttcttttttagtcattgtgttttttatatacctactactgattttcctcccaaactctttaccagaagtatatatcttctctcagtacctttagatacatgaggtttaatttttttatcttgggatccttctagaatcttctttcttcagttgcattgtggattggttgctctctatcctctggcagagttatcattctaagaccagtaccctgggaattccgttagcctctctgctgtgttggatctcatttattttcctctgtttgcctctcatttttgtttagaattttctagtgactttccgaaaaaggttatatgggaggtaaattttgaattctagcctgaacaagtcatccaacctttctggggctgatgacacccacctcagagcataataggaaggagtaaatgccatatgaagcacttagctcactgtcaggtccataatgtaggtattctgtgagcagtcatgatttctaattcccaactgtaatatccttgggagacatcattcgtgttctgtttatatttttgacagccttccacccagccccatccttgtgcagtgcctggcacatacatggtagaaacatggaaaatactcaattagtaacggggtggatggatacatgggttagatatttagctggggacatttgggcacaagcttccaaaagtcaggaatggatgttcccagcctcccagcatctttcttcttggtgtatattctcttcatttttgctgttggctactttaggaccaaaagaagaaacggtgaatgatttctggcggatgatctgggaacaaaacacagccaccatcgtcatggttaccaacctgaaggagagaaaggaggtaagtggaaaaattggatgtgaacagcagaaggatcactctgcatataagctctgagtttaagcctggctgtctatcctttgtgggtgctgtaccagtagttcatccagaaagacacaggctgaagtctatcagactttgctatggcctggaagccccagatatgaacctcaggtgtgtgcctagagcacattccctgtatttggtagtcaaacaactcaccctggttccagaacagcctgaaagagactgacttgggccatcagctaaggaaaagccacagaggggttttttttgttgttgttttgttttgttttgttttgtttttttattgatcattcttgggtgtttctcatagagggggatttggcagggtcacaggacaatagtggagggaaggtcagcagataaacaagtgaacaaaggtctctggttttcctaggcagaggaccctgcggccttctgcagtgtttgtgtccctgggtacttgagattagggagtggtgatgactcttaacgagcctgctgccttcaagcatctgtttaacaaagcacatcttgcaccgcccttaatccattcaaccctgagtggatacagcacatgtttcagagagcacagggttgggggtaaggtcacagatctacaggatcccaaggcagaagattttttcttagtatagaacaaaatgaaaagtctcccatgtctacttctttccacacagacacggcaaccatccgatttctcaatcttttccccacctttcccccctttctattccacaaaaccgccattgtcatcatggcccgttctcaatgagctgctgggcacacctcccagacggggtggtggccgggcagaggggctcctcacttcccagtaggggcggccgggcagaggcgcccctcacctcccggacagggcggctggccgggcggggggctgatccccccacctccctcccggacggggtggctggccgggcagaggggctcctcacttcccagtaggggcggccgggcagaggcgcccctcacctcccggacggggcggctggccgggcagggggctgatcccccaacctccctcccggacagggcagctggccgggcgggggggctgacccccccacctcccggacggggcggctggccgggcagaggggctcctcacttcccagtaggggcggccgggcagaggcgcccctcacctcctggacggggcggctggccgggcggggggctgatcccccaacctccctcccggacggggcggccggccgggcgtggggctgacccccccacctccctcccggacggggcggctggccgggcggggggctgacccccccacctccctcccggacgaggtggctgccgggcagagacgctcctcacttcccagacggggtggctgctgggcggaggggctcctcacttctcagaccgggcggctgctgggcggaggggctcctcacttctcagacggggcggttgccaggcagagggtctcctcacttctcagacggggcggccaggcagagatgctcctcacatcccggacggggcggcagggcagaggtgctccccacatctcagacgatgggcggccgggcagagacgctcctcacttcctagatgggatggcggccgggcagagactctcctcactttccagactgggcagccaggcagaggggctcctcacatcccagacgatgggcggccgggcagagacgctcctcacttcccagacggggtggcggctgggcagaggctgcaatctcggcgctttgggaggccaaagcaggctgctgggaggtggaggttgtagcgagccaagatcacgccactgcactccagcctgggcaccattgagcactgagtgaacgagactccgtctgcaatcccggcacctcgggaggccgaggctggcagatcacttgcggttaggagctggagaccagcccggccaacacagcgaaaccccgtctccaccaaaaaaatacgaaaaccagtcaggcgtggcggcgcgcgcctgcaatcgcaggcactcggcaggctgaggcaggagaatcaggcagggaggttgcagtgagccgagatggcagcagtaccgtccagcttcggctcggcatcggagggagaccgtggaaagagagggagagggagaccgtggggagagggagagggagagctgttttgttttgttttttgagacggagtctcgctctgtcgcccaggctgaagggcagtggtgccatctcggctcactgcaagctccgcctcccgggttcacaccattcttctgcctcagcctcccgagtaccacccgccaccacgcccagctaattttttgtgttttttttagtagagacggggtttcactgtgttaggcaggatggtctcgatctcctgacctcgtgatccacccacctcggcctcccaaagtgctgggattataggcgtgagccaccacgcccggcccacagaggagcttttttcccctggtttctctagttccttatttccctggttttctgccccacctgctgaggcctttggtatatcctggatcagcagagggagctttatgaactgagaccctgcaagccaaagggaatttgaggccttggcctaatcctggaggcagcctcctaactgggccttttccttttgtggctaccaagtgcatgcctggcctaaccagctctatcactgggccacagccagagccaattctgggtcctggggtcgagccccagcgaggaatacctatttgttaccgtgtttctcaaggatggcccttgagtcaccttgatcctagggtatcgggtgtcatgatcaacagctccacagtggcatgggaagacagtgctagggctgggctttaggttagtttcctccaaccaaacctcttgctcttggaagctatccaaagctcaggcaacagaaaaagctctaggcctctcatggcaggtttacagtctgcatcagtctaccctggtggccccctcatagcagactgctggttcgaggggttcaaacaggctttctcctagagcatgacctgaaatgttgtgaaagtgcagattttgtaggtaagatggcttcagattcgccctgaaccaagggagtgtgggtgggaaacattgagaagtatggggctagggctgtgtgtaagttaggagactgtgctcaataggatggcggctaaggaacttgagaaaagggcaaatttgaataagtaagtgtgcaactgactgagatagagaagaggtcaaagggccttctgggggactttaatctgggctttgtgggctcttccttccaggccctttgcatctgccatgggcaggaggtctaaggtcagggaatgtatgtctttttctttccagtgcaagtgcgcccagtactggccagaccaaggctgctggacctatgggaatattcgggtgtctgtagaggatgtgactgtcctggtggactacacagtacggaagttctgcatccagcaggtagtgtctcctctgtcctttctcagttcttatgttggatctgctgaccagtaagagggaacaggctggatcatcccgctgtggtcaggagttgctgagtatgcagtatgtgaattctgaaaccagatatccgggctcaggggaacttgtctgtcaaagctaaaggagcagtattttcatgactggtgaaaaattacctgttgagatgaagtctgatcatttagatatgaccaagcactgtggaaagggagcatggggaggcagtgcagtctcctaggtgcttgactcacctttctcctcctttcctactccaaagactcctgacatcaaggatgtgatgggcctgcccctggccctccaggcaaccctggagacctgagcaaaggtcaccttcagccaaggggcagtgtggtactgcgaaaagaggacttagctgggagcactgcattttagttctgaccctgccactgactagttgtgagaccttgtgtctgtggttaactaactcccctgggtacacttacttttccattgtcactgacaaccacagctgtcaccttccctcccctggtactgcccacccttgggtatcagggccaacacacaggatctcctcacttcacaggtgggcgacatgaccaacagaaagccacagcgcctcatcactcagttccactttaccagctggccagactttggggtgccttttaccccgatcggcatgctcaagttcctcaagaaggtgaaggcctgtaaccctcagtatgcaggggccatcgtggtccactgcaggtcagtgtggcctgacccttgtacccccacccccacatttcgcccccatggccagagcaggggaacagcacaagggccctggctgaggaggctggcacagagtagatgacctactggggcaccagcgcaacagccagagactccaagttctagtgcagggtggagaatatgacttgaggaaggagggtagggcagtcctccaagattaggagttgggagaccctgctatgaagccaaaagactgggtcaagtgctggccatgtatttttgcagccttcggacccttctagctggaggtcaggattcaggacatactggagttgttggctcctggagagccccagctctaccccattcagaattaggatttagaccctgaaggaagagcccctgcctgtgttgcccctccctatctgctcccacaaggcaggctggccatccctataaccccctgctctctggctacagtgcaggtgtagggcgtacaggtacctttgtcgtcattgatgccatgctggacatgatgcatacagaacggaaggtggacgtgtatggctttgtgagccggatccgggcacagcgctgccagatggtgcaaaccgatgtgagtgatctgtgggtcaggtgagggtggggggttccaggactaaaacatctgcccacattgaggattcactcagtctcacaggttattgtaaatgattactatagagtgtgattgtgggggaaagaaagatagatcacactgttaccgtgtctatgtagaaaaaggaagacacgagaaactccattttgttctgtactaagaaaaattcttctgccttgagatgctgttaatctgtaaccctagccccaaccctgtgctcgcagaaacatgtgctgtattgactcaaggtttaatggatttagggctgtgcaggatgtgctttgttaaaaatgtgtttgcaggcagtatgcttggtaaaagtcatcgccgttctccagtctcaagcacccagggacacaatgcactgcggaaggccgcagggacctctgcccaagaaagcctgggtgttgtccaaagtttctccccactgagatagcctgagatatgccctcgtgggaagggaagggtctgtgctgaggaggattagtgaaagaggaaggcttctttggagttaagataagaggaaggcatctgtctcctgctcgtccctgggaatggaatgtcttggtgtaaaacccgatcgtacattctatttactgagataggagaaaaccgccttatggctggaggtgagatatgctggcggcaatactgctctttactgcactgagatgtttgtgtaaagtcagacataaatctggcctacgtgcacatcaaggcacagcacctttccttaaacttatttatgacacagagtcctttgctcacatgtttttctgctgaccctctgcccaccattaccctatagtcctgccacatccccttagccgagatagtagagatagtgatcaataaatactgagggaactcagagacgagtgctggcgcatgtcctccgtatgctgagcaccggtcccctggcccactgttctttctctatactttgtctctgtgtcttctttctttcctcagtctctcgtcccacctgacgagaaacatccacaggtgtggaggggctagcccctttcatgtgatgaagggctcttataaattatgtattcaaagaaatcgagcacagaggaggttgtggtttcatgcctgggagagtcaggaaggcagatgacaggttactggacttcaaagattagggaacaggcagctgaaagagccagtgcccagagacatgatgaagctcggccacatctgggagcagcagtgagattggctctgcagttggggcatagcaccaggagggaggcagggaccagactatcacgggctttgggtgtctccagtttctgacagccccttcagactattaaatctgcactctcagaatgaacaggaattgagtttgtccttctctccaggcgtccaccacccccaagatagacctggacccttcttcccaagtaaagcacccccacagggactcctgcatttcaagtcccacttcactaaattgggataataagagggagtccttttattcctgctaggatcaaaggagaaatggactggagtgaagtgggggtgggaacaggtgatctggcatgagaactatgttgtatgtaaccaagaacttctgtgtcattcatgtttcagatgcagtatgtcttcatataccaagcccttctggagcattatctctatggagatacagaactggaagtgacctctctagaaacccacctgcagaaaatttacaacaaaatcccagggaccagcaacaatggattagaggaggagtttaaggtgagttggagctggataacctccttcagattgaaggatccttgtaatctggggaacatgggatgcctgactgtgcatttgccaacagtaaatccccttgtgaggcatgccagtggttaaggagatggtcctttcctcgtactctggtaactctcaactcatcctgcacgttggaatcactttggttgtgttagagtagggagaagcaggcaacagtattttaaggcccctagccctccgaggtgattatgatacacagcaagagcagttttttctgtaagagccagataataaatattttaggctttgcagcccacatggtttctatccagctacttagtgctgtctttgtaacacaaaggcagccataaccaataggtaaatataatgagtgtggctgttttataaaactttatttgcaggcagcaggcagcaggccagatttggcctctggaccttagatcactgatagctcctatatgccactagacaatggttctcaacacacctaaggcatatgtcacactgtcatcagtaaaagtgctctcccaggctgggcacagtggctcacgcctgtaatcacagcactttgggaggctgagacaggtggatcatgaggtcaggagttccagaccagcctggccaatatggtgaaaccccgtctctactaaaaatacaaaaagtagccaggcatgatggcacatgcctgtagtcccagctactcaggaggctgaggcgagagaattgcttgaacccggaaggcagaggttgcagtgagccgaaatcatgccactgcactccagcctgggcgacagagcgagactccatctcaaaaaaaaaaaaaaaaaaagtgctttctcagaagcaggagattctgggttggggtggggaggaccacttagagaagttcttctcaaatatagcatgtgcacagatttctttgggatcctgtcaagatgtgggttctgccaggcacggtggctaatgcctgtaatcccagcactttgggaggccaagtcaggcagatcacctgagctcaggagttcaagaccagcctgaccaacacggagaaactctgtctctattaaaaatacaaaattagccaggcatggtggcacatgcctgtaatcccagctacttgggaggctgaggcaggagaatcacttgaacccaggaggcagagattgcagtgagctgagattgtgccactgcactccagcctgggtgacagagcaagactctgtctcaaaaaaaaaaaaaaaaaagatattaggttctgattcagcaggtatgagttagagcttgagattctgcatttctttttttcttttctttttttttgagatggagtttcactcttgtcacccgggctggggtgcaatggcgcgatctcagctcactgcaacctctgcctcccgggttcaagggattcttctgtctcagcctcctaagtagctgggtctacaggcacgtgccactacccccggctaatttttagtagagacagggtttcaccatgttggccatgcgggtctcaaactcctaacctcagttgattgcccaccttggcctcccaaagtgctgggattacaggcatgagccaccacgcccggcttgagattctgcatttctaataaggtgaagccaacgctgctggtgtatgggctacactttgagtagcaaatgtcaagaaggagcctcaatcgggaagggaggatgcaattctgaataagtttttttgaagagccttaggcagcctctgggggtggaactgcagagtggacacactccctcctacgatgctggaatcccttgctccaggatcacaaaattccaagccaggagaatctcaagagagtccacaggagcctggaaggtagcatttcccaaacagtctcttggcttcagggttccagctgaacatatgggaacagaggtcagggccctggtgagaagagcagtatggagccagagtggcctggaggtgcaggccaagggacaggcataatcttgtcaagttcagttactgggatcagtaatgtttcccctccccttcccaattcagaagttaacatcaatcaaaatccagaatgacaagatgcggactggaaaccttccagccaacatgaagaagaaccgtgttttacagatcattccatgtaagagccctcccgccactccaaagccttattgccccatccctcaattccctccaccccttccatttctcaggtactagttaatgattggcgtatagacaagaatcatggcattgcctcttgttgcacccacttaacaacatggcgttgccttttgttgcaccttagtggcttctggaaataacgtaaaagccaaaggctttctccctaatgagctaggaacagacatgtccttgcccagctgggattctgtctgcccagggcctgaggtgggagcaatgcaaggagagggagaggacaaatgatattggctagccataagccgctattcttcttacagatgaattcaacagagtgatcattccagttaagcggggcgaagagaatacagactatgtgaacgcatcctttattgatgtaagtggtgggtgtgacccctgagcccccaacaccccgtggagattcagccagcacttgcagtgcctccctcccatacctgctggggaggatcatgtttgaatcagtcaacaaatagtgaattgatactcacccacccactcaccctgtgcattaggtctgtccagctccatagagcagaaggtgggggaaaacagatggcatgcagtagtataatacctggaagaaaaagttcacagagcagaccacagccaagaggaacctggctgccccctgatctttcccattcctgccctcttcatcctagctctaatccctgttccacttccctgtctcttacagaaagcaaccagcttgtcagatagggtttcgtccttggccacaggggagctctgcatgggctgagtttgcctccgagcagtccccattcccttctagtggtctgtcttctccactagtccctctgtgattaaaccatctcacccttgcaattaacctggcctgtgcagggctaccggcagaaggactcctatatcgccagccagggccctcttctccacacaattgaggacttctggcgaatgatctgggagtggaaatcctgctctatcgtgatgctaacagaactggaggagagaggccaggtgagttcaaaaggtcctgggtggtgagagacagagacagcatgaaaagatgtgtgtgtaaatggggacgttgggaaggcaagaaggtgtttggaccttgtctttgacttatacggtccaaagagtacgtttgcatagtataagtacatacttaaaggtatataaatacatatgcatttccaggattgcccagcccgttggtgtctaagcagtcattagcttctcccaagactagaaaagcaatgtgatctgagcctccatgttattcccagacagctcacacccttgcactttctcctgaatacagtccccctagcctagcctttgcacagtgccccaggcggggggggcaccctctccttcccagtgccccaggcagggcagataggtcaaggttctgaggtggacccaatatgagtgtccctaagaagggattgcctcattgctgactacataaaataaagcagtagaatttgagaaattatacaaacaagaaacttacagtctaatattcagtaataaggaaatcttttaaagaaaaaagccctcaggtctattaaaaagcagagctgtccggaaactcatactaaaaagggacactagcagtcccctaggtcaacttcctctcagtataggaaacctcctaatattgttcctgagtcagaatcatacagcctctactaagcacattcaatctcagggatatctccctcaccccccacattatggggggacccagtctgtgttctgacaatgcttattcttttaaaaattatttctgttgaggttgcacattgcagcaaatgagcggttcactatgtctggggtgtcacttagcagggatgagaatctagagaatgggcctggagagaagctagcaaggcctggtgagaaaattccttctaagccacagtgaagagtttggtcttcctaaagcaattgaagagcccttgacaacatcccatttgtgttttttaaaaaatccctctggcagcagtgagaaggactcattagaaatgcgaaagctgtggcagtaatgctggtggcctggactcgggtggtgagagggtgctgtcccagaaagggtgaagtgaggaggaattaaggatggcacccactcatgactcattgaatttatagtcaaacatttaaaatacaaagtatgttttacattagttgtctcaagtcactagttgttccccatctgtacttgtgttaactttggtacaaggctttacacatattttctcaccctgatgtttcattacatcaggattttttttttttttttggttttgtttgtttgtttgtttgtttgagagagggtctcactttgtcacccaggctggagtgcagtggcacgatcttggctcactgcagcctcaacctcccaggttcaagtgatcctcccacatagccctccaagtagctaggactaaaggcacgtgccaccatgcccagctagtttttgtatttttttgtagagacagggtttcaccatgttgcccaggctggtcttgaactcctgggctcaattgatccacccacctggttgacccaaagtgctaggattacaggtttgaaccaccttgcccggcatttttttcaattttgatcagtcatttaactcattagctattcttcctagacttgtatcatgtacctaatcaacagacatactttgtaggtcttcatcatcttttttttttttttttttgagacggagtctctgtcacccaggctggagtgcagtggcacaatatgggctcattgcaacctctgcctcccaggttctggcaattctcctgccacagcctccctagtaactgggattaaagacacccaccatcatgcctggctaatttttgtaggcacggggtttcaccatgttggccaggcttgtctcaaactcctgacctcaggttatctgcctgactcagcctcccaaagtgctgggattacaggcgtgagccactgcgcccagtgtcttcatcatcattaataacaatactgatgaggtgggaggttcggttaaggtgcttggctttgcactcaaggaagcacacacctgagtaacaaaagctgtttaggaaatgagccactgtgttctcaggagctaggtgcctgttcctgccgtctctgatcagtcgtgatggaacctgcagatcagaccagggccctacctgtggttccttctgcacccctgcccttcagatctgtgatgggcaggaccaaagagcaggccgaagagctggaaccacgagcacaaggaccatctcggcccactgccctgtgataaaatgtggcccagtgaacatctccgcctctgtccagtcagatgcaggctcttccatccttgaaaaggacctagtgagagtaaagggcagggggcaggaagcatttcatgtgtgtggcggtggggagaagagtcgtgcgcacacaaattctgctgcctgttgagtgaggcctctccctctgccttccactgtagcttatgctctgtcttcctaggccagtgaagcagacagtagtgcttgccctcaaaagcttctgagtggattggaacaggatgttagtgatgttctttacaaggcctcactggcccccaagttcactttctgttccattcatgttgtcaagtgtagctcccagaagtaattaacgcactaagcctaaatgatgcaatgaaaggtgcctacacttatacagtgacactaccatcctcacctacaatattaagttcccagagaaaaaaattcgatcccataatataaattctgtacttacaaattaaaatctcgaaggaattaaaaatttttaattatctccctctgctttttttttttttttttttttttttttgagatggagtctcactctgtccaccagactggagtgcagtggcacaatctcagctcgctgcaacctccacctccagggttcaagtgattctcccacctcagcctcccgagtagctgggattacaggcatgcactaccatgcccagctaatttccatagtagagacagggtttcgtcatgttggccatgctggtctcaaactcctgaccccaagtgatccgcccgccttagcctcccagagtgctaagattacaggcatgagccattgcgcctggcctccttctgctctattttaatcaaaagggtccaccaggatgcctgggttccctcagcagctgcagcttggaccatcatcagcctgggcagacagagcagtgccaggaactcccatgctgggtcaaccctaggcctagcccaaccctaggcctcatcctgcttctctaaagcatagtgaaacctgatagcattagtcttcacaaagctgtgtgtccccatcaccatgtccgccttagacctcataagagacataagacataagagacttcatgctatctggtggaaagacaaagtaggagaaaagacagaaaaccttccctgtttcacttctttaagatgctattatctagaggccgtaacgtgaacacacaaatctgagatgaaactccagtccccagcttttcttctactggtcttgaatccccattccccatcttctgtccctcacccactgatgactttaacacctggcttactgctccttttgagcccctgttcctgactctgcttttggaggcatcagtcaccatgtggatgatccatctatcctcaatctttctattcctcagcttcctcagccacctgatcccatggtcaagtcaccatctgccctgtatctgcactgcccttggaatctcaacaaggcatccgccctgtttactgcctccttcctcccacctcagtattctcttttattccagtcatttttgtcttcatcaagtccttagagttattgatgcctccactttctcaacatcagtcacaccgaacatgtcctcaccttcctccttactctgtgtgtttttgagttctgtttttgagcgtttgagttttctgatttgagtttttgtggtatgtcattattacctttccttattccctcatgctttcttactttcatagcaaactctctagtaaaacccagttatatgcctctatctgatatagcaaacatcactgggcaaaaacacaaaacagtgccaaatgctctcacactgaactcatgaccacaaatctcatagaggtaattggtgccacctagcaatgctattgctctttcttttcttcctgaaacctccagcatctgctcttgcctgtcccatcatactcacaccttagcttgtgacctggcctcattcttctccaagaaatcagacaagaacactgtcatcctcccacccccaaacaaccagcctcttcaaatctgtaccaactctattctctcttgttacagtggaaaagggtttctgcatctctcaatccacctgtccactgtgctcttggccccattccgtcctgcctgctcagggatgttgctgctataaccatcttctctcccacctccatcagcagttcccctctttaaccactactctcatcagcctatacatgttacatttcctatcttttaaaaacaaaaaatctgctaatctcactttcccttccacctactatcctatttctctgcaccccttcccagcaaaactcctttaaagagttggctttcggccgggcgcggtggctcacgcctgtaatcccagcactttgggaggccaaggtgggcggatcacaaagtcaggagatcgagaccagcctggccaacatggcaaaaccccatctctactaaaaatacaaaaattagctgggcgcgatggtgcatgcctgtgatcccagctactcgggaggctgaggcaggagaatcgtttgaaccagggagctgaaggttgcaatgagccaagatcgcgccactgcattccagcctggtggcagagtgagactccatctcaaaaaaaaaaaaaaaagagttggctttctccctgcaagttctctgttcgctctgttccttccaggcttggccccactgggactgctttagtcaagatcaccagtgactgtcctcttgccaaatccaaaggtcatttctcttttctgatttttttttttttgtccttacagcagcatttgaaagagtcagtacctccctcctcttcctcagaacacttacttccgtagcatcaccccactcactaacctggcagctcctttgttatttctttgtgacctcctcctctaaaacattggagtatactagactcgggcgctagcccactctgttttcttttgacacactagcccttcaggatctcagccagtcctatggctttaagtacaacccatatgccagggatcctcaatctgcgtctctaggccagtcacctgtcccccttcccaatgtgggctcctgatttcctccttcccccgacaccagtccaccccactcttagccatctaaataaatagtaccaccttctgcccagttgctcatgtctaaaatccgggagttaccttccttcctcccctctcctcacccctcacatccagtctgccactgagtcctgatacaggcagagcctccccacttttctccagcgtaactgctgtcatctgaacaagccctcgtctctcactgcttgcccgtgggactgtgggcatgactcatatgcgcagcctcgtctgcagtggcctggcaactggtcctcctgctctcatcctaacccacttttagtttttcaaatggcagctgctggtccttttgaaaatataaatcattgtcactccttgtcttacaaatcctgtttgaggccaggtgcggcagctcacgcctgtaatcccagcactttgggaggccgaggcgggtggatcacctgaggtcgggagttcgagaccagcctgaccaacatggagaaaccccgtctctactaaaaatacaaaattagcgggcatggtgatgcatgcctgtaatctcagctactggggaggctgaggcaggagaatcacttgaacccgggagccggaggttgcagtgagccaagatcgcgccattgcactccagcgtgggcaataagagtgaagctccatctcaaaaaaaaaaaaaaaaaaaatcctctttggtcttccagagatcttgagagaaaatccgcccatgtatacaaaatttagagacttttgatcagatgtggtggctcacgcctgtgtaatcctaccactttgggaggctgaggcaggtggatcacctgaggtcaagagtttgagaccagcctggccgacatggtgaaaccctgtctctactaaaaatacaaaaattagctaggcatggtggcgcacacttgtagtcccagctacttgggagtctggggtgggagaatcacttgaaactgggaggcggaggctgcagtaagtcaagatcatgccactgcactccagcctgggcgacagagcaagactctctcaaaaaagaaaaaaaaaatgagactcttagtgttgatacctagtccctagacttgatatgtatttctgtctgagagatcatgctcaattcctccagcacacacacactgtggctcacacccatggggaccttatggttctgatggttttaaaggcccagtcttcatcccagctgagacactgtgtaaagcagtgttgagaaggcactgtggtagcaaaatccattccacccaccagtgccataaaaactaatataatgcctgatcgaggtgagccttaatgagaatttttttttttttttggctgttctggttgaagagaggcccagggcaccgatccctgaggcatccccagggcttctagagaacatgggtggaaaagcactagtccagggcatgttcttgattcaacactttaataatcatgattttatttggactgtgagactattcacaatttctttttctacttaatttttttccaaatctttcaatgacattatatgtatggttgagaatttttcaattgccagtagtgaagaatctcagatcttacccccaaattctctaaagaaatgggcagcataactgtgtgatgttatatttatgtatttatgccttggcttgttctgcagacattgaacaaattcatttaccagatactgagagcctaccatgtgccaggcattgtgcaaggtgtggggaatacagagatgaaaagagacgcagccactcccacaaggagctgtagagggaagtgagccaggtgcaagcaaagacagacagtagaccacctcctgctcactagcaaggacagaaaggcgagtgctagcaacttgaaggtaccttgcagatcaaagagataaaggtaaaagggagaaaggatactgtggcctgggcggtggtgaagcccatggctgtgtgggaatgtgaattggttctgattttctgaattagcagtctggcggatgtaagcagcattaaatatgaaaacaccccatgggagaaaaagaaaggaattggaacaaagattttcactcgtcctcctctccctgcagccaccaagtattggataccctgtgagcctgtagtcagagtcctttacagaccccggcagtgttttagatggtctctggtgaggatcggaggttaattggaatgatgtgatataatgatcctgcaagttttcaataccttggggacgaagcgtatcagcgtaagaggtggctgtactgagaggggtcaggctgctcgtgggcagtgctgcttctacacatgtggtactctgagctcctcacctctccaacctgtctctccaggagaagtgtgcccagtactggccatctgatggactggtgtcctatggagatattacagtggaactgaagaaggaggaggaatgtgagagctacaccgtccgagacctcctggtcaccaacaccagggtaagatgggtcgtgggtggactctgcccacaggaaaagcagggttacccctgcctccctgatccccttttttccaaaggagaataagagccggcagatccggcagttccacttccatggctggcctgaagtgggcatccccagtgacggaaagggcatgatcagcatcatcgccgccgtgcagaagcagcagcagcagtcagggaaccaccccatcaccgtgcactgcaggtatggctcacccttgccctcagcgggagagagaaagcgaggaggggcagataggggaagctgatgaccatgggtcagactgaagaaagccatacaagagcaagatattggtgagcacatagtagttgagattgatgccaagacaggattggatgctaagagagaggaccttggagcttgaacttggcacaataagtgctaggggactaatgttcagatagtgggcaggagagcagcaggggagactggcagtggagaccccggttgtgctatgaacagagggtgaaagagaagaggagtcaagggtgtctcccaggtttgagcctgggttggtgtgaccagcagaagagagacagtaaagaggtttgtttgaggggaaaagttgaattttgtatggggcatgttgctggaggttacgttttagaaaaaatgcactcctttacttagaatcctaacaacagcttacaaggcccaatatgttctgaggggtccctggccagggccgggagaggatggtgtgcaccatgggctggctctgagcacactcctgccatgggcctgagatgccagtttcccaggcagccacagggctttgcccaagccttccctgagtaccctgccagaactcccactcctcttttctctttccttaccacacatcttcttgtctggggacattgctaaaccccacagtccctgcctcagagtaggcactcagtgtctggtgagtgaatcagctgatgacattgaatagggggatattgtcaaggtcagagtctggattccgtggatttgggaagaaagtgaaagacatggaaaggaatcagcagatacacaccagtgtagggagtggggtttgtcagaaaaagggaaagacaggactagagctagttctaactgagcgaacagcaggtcagaacaacctaggccagcatgtgcaggtggacagcaatggctctgtgctggtggggtgtgagtgaaggtcgtcccccacggtccaacaggtgagtccctccacagcacatggggccatgcaggaagggcacagggtacactgcctcccgacccagaacccctccaggctggtgggtccacagggcaaaggcgagcaccagctgcctgcccccacctcttctgccactcaccactgtcactcacccccttgcacagagggccatcacaggtgtggtaaatgtgtctgctctgttgcagcgccggggcaggaaggacggggaccttctgtgccctgagcaccgtcctggagcgtgtgaaagcagaggggattttggatgtcttccagactgtcaagagcctgcggctacagaggccacacatggtccagacactggtatgctgcccacatatttgtccctgccaccacaccacctgcagcccttctctcagggaggaggctcttcagaggggcccacccagtagtcagaagactgtctaaacacagacctgcccttgccctcccaaggtgccccaaatacacaggaaacattgggaggcaggatggcagcaatgggagcatagcccctgttgccagaggttgggccaggttagaaggggtgtctgggtgccccacagggctcatctgtacttctctgtgggtcttgggtaaggaagatccatgaagagtacctgcctttgggcttgggctccctgttaagaggtctgactttaataagccgcacatccacagaggttttcctgaatcccatggagctagaaatgtttggggggtaaagaaaagtgaatgttaggaggtttgggagacgaggttctgagagccagggtgcatgctagcctggcagccatggtaagcgtgggccatgctcagctgcactgtctcccagcccagcacatgcctgtctgacctctgtggggcctgggtcagctctggtcagctctgcttgtagaaggtctgctgcattcagcccggaaggggaatgctgtcagaactctggcaggcagatcagagctcaggtgaaagttcaaaaacattcagttcctcttgattttccatcttcaacaaaaaaatgagtctgttaggaattacaggtactgtgtgttcttcagtaaccctgactttttccctacctttcactctccaggaacagtatgagttctgctacaaggtggtgcaggagtatattgatgcattctcagattatgccaacttcaagtaagcggcaacaagggtccgtggaccaggaggattgcctttaatattttgtaatattctgttttgttaatataccccaaattgtgtatatatcttataactgttttagaaattggtacataggcttctattacctattaggtggaaattttatatgtaaatgtgttagcactgatagtcctttttccaatgttttattggggaattaaatagtgtgatgtttggattgatatcgtgaaatcctcagccgagaaattgggctggattgtgctttggttaatacatctttccctaaagaagataaacacaaaatccattccaggtagctcggcaccaactaagaaaaaaagcacaaagttctcagagctctcgaggaaagtggttgtccccgtaccaccatgcactgtaaatatccctcccctctctccctggtcccctcccccatccccaccactgatatcatggggagtaataggaccagagcggtatctctggcaccacactagggactatcaggtaataaaagctttgactccctgaggaaatgtctctccctttgtctgggggtggggcagccatacaggctggggctctcctcggctgttcatggccctcctgttgctgttctctctgagttatctgagagaggccacagtcccccagctcctcctgtccaccaaacacagcccttccagttcttaggtgatctccaggaccctcctttcattcccagcacatctttggtttagtggtcctggccagcctccctccctaggaaggtggccaggtcctcactgagtctccttaaggacaggggcacaggggagactagagctggctcagctttgggctgaggccagtctgacctctccagtctgtggtgctttgctacaaaactgtctggattgtgtcaccctatctaggataaatctttatgtccacatatattgtgttgaattgttcccattttctttcatacgtgtcctcatttctgggacagtgtgaatgtttctcagatctagaagtcagatggtgggagtcttagatccgaacttggttttgagtgacatgttagacaaaagtgttgaacttttgtttcttaaagaagctggatgttcatttatgtctcccgtaacagtctgtgctgtccagagacccagtatccttaggatattattctcatcctcatggttgaagctgggtcactgccatgtccataatccaccctgaggaaagagcatggagagccagcagcttcatttctaaggacaggaagccaaatctgcacttttcacttccactcataatccaccccgcattccactcatcagcttcacaagtaggttttcacctggtcatagctatgcctaactacagggagtgctggggaagtgtgatcttttgttgggggcacactgggagagtgggtctgtccactgcctcccagcctcagagcagctcaccacaggagcaggagagtgaactcgtggctgtggctgtcaggcagggcctttcttgagagccagcgcaggcctgggctcctcagaggcttctggagtgagagatggcacctcagcctggcccatggaggcatgttcagggatcagcactactgtgcttcttggaggaggtgggacttgagctggacccatgggaggctggaaatttagatgagtgaaaaggaggaaaggcgaagtagagccacattacagagggcctcagagtccagataaagcagttaacatgtagtggctccaggagggaagcctgtctgtgcaccacatacccaggatgtttgtgggaaggaaggagatgtgcggaagggacccaggagacctgcaggaggcaagggctgcaacagaccccctctggaagtttacaggaggtgagtgtgagtcattagagacattcagttctgtaggaactaacgaactcccaagaggcagtaaacttaaaactcagcagtctcgataagtatggataaattaggcaaagacagattctgaggaatttctggtgaggggtgccaagtttggggagcagcccctggctccttgcaagctacccttcagtgctctgtgtgaccaagtccaagtcgatgcaggagggcaggcactgggtcagcaagccactcagtgaatgtgcaggtgaggccgttcataggcgcttgtgtgcctcccagcaggctgcctgccattgccagggctggccttcagcagggtgcgccaccatggcctgagtggttttctgctgaagtccgtgctgatttggccagtggataggcatcacctgggtgcaaaaccattgtctccaggtaggaatgacctcagctgtttgctccgtgtctcgctcagcctgtagatgtgtccctcatcccttcatgcctccctcttcactcctcttttactttctactcggggcttgcatgtttacaagagaggtgaacccaacagaaactagtataggccaaaaggaaaatgtgctgaagctcacacagcacagtcgtgtggaaaaggcagcagtgactgcttcatccagtgcccttcccacagccagtcagttgcgacccaaggggcttagggtaggagtgtttctccataggggaagagtaacagcctgcacccaccacacacccaaagccctacatcctgccacactgagacctcacttcatttgggcgggtccctcctgggttgcagtttccttcattgctcccctgtcccaaatactcaagtctctctcattaaaaataaagagcaggccaggtgcagtggctcacacctgtaatcccacactttgggaggccaaggcgggtggatcacttgagcccaggattcgagaccaacctgggcaacatgacaagatcctgtctctacaaaaaataacaaaaatcatctgggcatggaggcacacgcctgtagtcccagctacttgggaggctgaggtggaaggatcacctgagcccatgaggtggaggctacagtgagctgtgatcatgccactgcactccagcctgggtcaaagagtgagaccctgtctcaaaaaaaaaaaaaaataggccgggcacagtggctaatgcctataatcccagcactttgggaggccaaggcggacggatcacctgaggtcaggagttcgagaccagcctggccaacatggtgaaaccatctctactaaaaatacaaaaattagccgggcgtggtggcacgtgcctgtaatcccagctaccggggaggctgaggcaagagaattgctggaacctgggaggcagaaactgcagtgagctgagatcacgccactgcactccagcctggatgacagcgagactccatctcaaaaaaaaaaaaagaaaaagaaaaagaattaattaattaattaaataaagagcatgtctcccaccccaggcctaagttcttccctctatgagagactacttgcagaaacctgtgttctcactcttcccccttcctcacttcattcccacacatttcttttccatccctgcgcaccaaggtcaccttggtgctaaacaccagggacccatggtctcttcccctttgtgtcacaggctgtcctctgcctcttatcctcaccctttagctgctcctccactgtctcctctctcagaggtcaggattctggatctgtctctgtggaccctcagctctcctccaatcccaagtcccccgcatcctggtcgcatgtcagggtggtccagagatgcctgcctcccactgcccacacccaggggcccgccctcctttcctctaaccttcccacatactctggccccatggatccacggcagttcctgctggcccttctccattttgttccttatgctgcacccctctgctgccactccctgcgtccgtgactccagctcactcgtctctgtccttcacccaggccgcctgctcagggtttgtgcctctctgtgctcctgcagcacctgagtgtttattcacctctgaacctctgctttcccacctgagtacacgcagctcctggctgcagtgacttcatatcctgaggactggagctccgtggtgaacagatggctttctatgttctaatgagagggatacaagagttccacagttctagtctggaaaggaccaaacatttcttaaaagctaagtatgttgccggaaaaaaaagggagcagagctttccccaggaagcttggctctggtttagatttttcaggaaaagccggaatcaaattacagaataaataaaggcaaccatcccccttttaaaggtacaccagccttggtgcatctttgaagaaagcattctgtaaaccccaaccagaactaaactagtacgtcgaactcagattcattttcactaaaccacaagcaaatgtttccctaaaaatcacccagttaacaaagtccgcatatttaagccaaaacaatttaactgaacaaatgggccacacgttgatttccggtccctgctaataagtcagtctggaagttcacaggtgtgcccatcctgccttggctgctgaagtccaggtgtctagggctgactgatgcccattatgcctcccctcccccatctttgtcacaggatttgacgcaccagctctccaaatgaccctggccctcccatttgctgttcagcccaagtgcggagattggctatgaaccctgtaaacaggcctctgacccccagaggctgatggctggccaaggaaagctgagctgctgacgcagactgggaagcaagagcccacttccagcagcccaggctagctgtgtccaaatccatgactggggaggggttagagccttgagggacaaaattattctacctacctagggagactgcactggcccaacagctgggccccatctcatgggcccgcttcttcgccaggagagaagccactccggggtaggtactgccccacccaaacccagccatctggagtgacccagccctggttcccaggtgtgtggatgtgaattgtcccacccaacccactctacagtgagcaaacggaagccctctgggagagtggtcacagcctcccctgtacctctgaacagcctgccaggctccctactcttaggcttccactgtccaccagggaaagccctgagctgggagttggggagcccccaggcattgcccctgcccaggacacaattctcttttgggatcagggaaggctgtgagggctttctaggtctcaagatcaggagcttgaagatgcagcctgggaagtgggaaggtgagaccaggacataggccagcctaaagcaagagtcctgggcctgaaggctcctgggaaggtggtggggagggagcatgtgtcggtggcctcagggcagcagctgcctggtgaatgttcatggactggatgctctgggaagcgggttgggtggtgagcttctctcttcccctctgaagacgtcactggagtctgggggtggagctgcctggtctataaatcctggggccatcaggctagggtcctgcagctgcctgaaggagccatctcatccacagctcttccttggtgagtggggagccttccctaagggctaggacacctggaccaagtttcatcctgggcgtatggtgtgctgctcctcttccccattcccaggtgcctccacccctgaaccatgccagagaagtccccttttcctctcctctccccaacagctctaccatctattcttgtgcttgttgcccctggcatgggagggataaggggtagaagcacttgcccccatcaataccactcatccattccacatccccaactactatggaagagatacagcaggccacggagaaaagggcagaaggcctgcaactctggttccctagcactggtgctccaaacacgcctacattgagaactcccctgaccatccatctatcctcccatccattggcctgaattcaggtctctgttcccctccaactttcttccacttctggaaactccttgaaggaaagatggatggacctggacaagtgggagggccctcagagctggcaaggcaggtagcctctgtgccccaggctcagggagaaggctcgtcccctggagcatcatcccctgctgggccaggatcccccaggatctggacccctgtatgcttgggatgaggagcggtggcagagagggaagggcataaggagataccaaagctgcccctgagatgccagttttccaaagtggccctggaggaagtagggggatgtgggggtgaggtaagtctccttgaatgctgtaccctgtccattagagcagccatggccagctccaggcgaggcctcctgctcctgctgctgctgactgcccaccttggaccctcagaggctcagcactggtcccatggctggtaccctggaggaaagcgagccctcagctcagcccaggatccccagaatgcccttaggcccccaggtgggtgtctcccagcctcatggggaggaagaaagtgatggccgggggctcccccaccctcctggagcctgaggtcggggtagggaggacagcatcagttcccttctaaggaagggccctggacactgcagcaggcagcccagtccagactgcccatggcctcccaagtgatgccctggctcccctggacgacagcatgccctgggagggcaggaccacggcccagtggtcccttcacaggaagcgacacctggcacggacactgctggtgagtagggtgagaggtccccagcatcaagaccagccactggtcatcagaggccattgtggcttagggttgggtgctgggagggtggggagaatgaaacaccactgagatgccccctgccacagcacccccagccatttctcagtgcccctactgcacacagcagggtgctgtctgctatccttcctatttcccaggaggattctagacaatttacaaagcacttgggttaaagaccaaagtcactagtagactagaaggagataattgttctataagacagtggtggccatgggatcccacaggcatcctgacaagccaatgactgtcttgaggtggacagaccccaggccagtggaaagaggtgagggatgcaacctcactcaaacagacaacagggccaagaggaccaggtggtgactgacatgtgcactaggaacatctcagggactgcagagctccccaagaccatagcagaagacaggcgtggggaaatggtttgctactgttttgcaaatcaaacatttacagtgcatcaggagagcccggtaactaaagaagaaagtggttagttcctatgaggcaatgtcttaccgcctgatttgtgtgtatgtgctgaggtttctatgcgtcaggcttgtttagggtggacaagagggcatgcccaagggagctggagatccccacactagctggatcctcaggcttctacgggaggcggggggcgtcctgctgtgggaggccacatggggactgggggggacgagaggggagagaaccaggaagatggcagctcggcggttacgagaccagtgtcctgagacatgaccgccacctctccctccgcagaccgcagcccgagagccccgccccgccccgccatcctccaataaagtgtgaggttctccgaagctgttgcgtcgagttctgtccttcgtcccctccctgtcttccccgctgagacccttccctgcgtgggggctggagggacgcgggtccggccccgcgggcgggagtaactaagggatggccccgggccctggcgggaaggccgggccagagcctgggggcgggatgcggacgtccgcagggtcgccgcttcggttccagaggccacacggccgggcggggcgtgagggacagcccgaggactacaggtcccaaggttccccgcgccgcttccggggcacggtggcgtcccggcaccgcggccgcagtgaggagactcggccatgctacgcgcgctgagccgcctgggcgcggggaccccgtgcaggccccgggcccctctggtgctgccagcgcgcggccgcaagacccgccacgacccgctggccaaatccaagatcgagcgagtgaacatgccgcccgcggtggaccctgcggagttcttcgtgctgatggagcgttaccagcactaccgccagaccgtgcgcgccctcaggtgtgcggccggggggaggtggccgcccgcgcgcgctggtgacggtgggagtgggcggagagggtgctgattcctggcgcgtctgcacccaggatggagttcgtgtccgaggtgcagaggaaggtgcacgaggcccgagccggggttctggcggagcgcaaggccctgaaggacgccgccgagcaccgcgagctgatggcctggaaccaggcggagaaccggcggctgcacgagctgcggtgcgtggggcgggaggcggggcggggcggcgcggcctggccggcctgggagaagcccgggccccgctcagcctcggccctttgaccctcacaggatagcgaggctgcggcaggaggagcgggagcaggagcagcggcaggcgttggagcaggcccgcaaggccgaagaggtgcaggcctgggcgcagcgcaaggagcgggaagtgctgcagctgcaggtgggcaacgtctccggagggtgggactccagccggggacgcggcttgcggggcactgggaattctgggcaccgcgacgcgggcgctggctatgtgcagagacttacagttggcaggtccggatttggagaggagagtgccagtcaggcgcaaagacccggaggtgagcggagtaattggacagtgttcaggtacctagcaggtctgtgggagggaccctgcgttccacaaagaggttgtattttgcataacaggtgatgaagccatgaagggttaagtatttcaggctaggattagcaggtgtgcgacttaaaagcagggagaccacttaggagtaatgcagtgagaatggatgaggcttgatttaaagtatagaagggtggctgggagcggtggttcacgcctgtaatcccagtactatgggaggccgaagcgggcgtatcacttgaggtcgggagttcgagtccagcctggccaagccccgtctctcctaaaaatacaaaaattagccgggcgtggtgtgcgccagtaatcgcagctactcgggaggctgaggcatgagaatcgcttgaacccaggaggcagaggttgcagtgagccgagatggcgccactgcactccatcctgggcgacagtgagactccgtctcaaaataaataaataaataaataaataaagtaatggggggaaggatgagttagagtgattcagaggggaccactgagggacggatttcacctaccaggacgtgagattttcatagctggcactcggggctatggctgaagtgtctgagaaaagaggaacgtggaaaagcaacctgatatcactccactgggaggccagaggggctctcaaataggacctgggttccaggcatgcttccccagggagagcaggagctgctttctcagtggggtgagaggccagcaggctgggtgggctggctggcatgtgcccaaggctcctgttcagctgggcttttctctcccgataggaagaggtgaaaaacttcatcacccgagagaacctggaggcacgggtggaagcagcattggactcccggaagaactacaactgggccatcaccagagaggggctggtggtcaggccacaacgcagggactcctaggggcccagtaaggacagtgcccgccagggaccatgtatgtatcatggcggaagagttggccctgacctggaataaagcagttggtgttgcttatgaggaaggttcagccttatccagcacagccttcacgttttgccctctgctgtcaccacttggtcagaaacttccaaacgcagtgccctgttctgccggtgtgtacagcctcagcgcaccaggagaccctagagtggtttccatctcacagagaatcagacagggccacagccccctcaggcagccaggtcatctgagtatcattaagagtagtgatgggaagattacagtctgagggccaaacgtgcctgcttcctgtttttgtaaataaagttttgttggaacacagccacacccactcattgacttctttttactacagtggcaaaggtgagtagttgcaacagagaccatatgaatcccaaagactaaaatctttaactttttacaggaaaagtgtagtgatctctcatctggagctttaggactctagcctgtgtcacccaggacctgagccacaagctaaccattggccaggcgcctgcctctgctctatactgtgctttgctggccagagtctggtgtatccaagacccagaaggcaaagaggagaccccatttttttctgggttccacaaagaggttgtattttgccttacaggtaatgaagccatgaagaattaaatattctaggctaggattagcaggtgtgtgacttaaaagcagggaggccattaggagtgggtctctccacccatggcctcagtgacctacatttgccctggcattgccattgcccttgggccacccagcagatggctgctggcaggggagacatggttgaccaagattttatgaggttagtgtggcttagcaagcacttggaccaacctctatgggtactgggactacctgtgatgatgaagagagtatatagatccatagtccctgttcagatgcaggccctcaagcagtgtctgggatgagctggaggaatgtttctcaaccagagcagcttccgtttgctgccatgcacatgaactccagcttctctccatgtctcccacttctttgcagggaaggcctagggacccccaagaaatgaaaacctttttttttctttcttttttttttgagacagagtctcactatgttgcccaggctggagtgcagtggcacgatcttgctcactgcaagctctgcctcccgggttcacgccattctcctgcctcagcctcccaagtagctgggactacaggcgtctgccaacacgcctggctaattttttatatttttagtagagacgtagtttcactgtgttagtcaggatggtctcgatctcctgacctcgtgatc

SEQ ID NO: 70 - DNA, 515 bp, homo sapien
gcatgcaagcttttagcatttaatggcttacgtcttcaatgactaaattctataatgtagaatagtacctacaataaacacaaaagacagtcgatacgacatgctgaaaaactctcgatgactgttttatagctaaaggcagaccaaaaatctgcagattgatttttttttattgaaaacagagataagagcacaatttggcctctcgtagttaatgacagtgattcaaaacacgcaaaaggctggctttatcttttctctggccatcatttgcttggcgagtcaatcatgagtggttgagagtgaatgagggggctggcaggtcttggttaatgttcagtcaatgaaagagccaaatacaaagatcaattctgcatgagagaaaattggatttttcagaaccaaatgaaaaacaaaatcaagtttaagcatatttaaaaatctgatttttaaatagacaacaaaattagtatttttaaaaggtattaaactgtagggtcacacttgattttgat

SEQ ID NO: 71 - DNA, 637 bp, homo sapien
aatccattgtaattcaccgtgttacttttacaagacctggccacaatctcttttcttaattttgtttttttttaaacacacagtttgcacgctgtagtaccttggaaatgtgcaaccgtgtcaacagagacagaaaagccaaagtaacacgaatctcactttcatgcagctatcagttaaatattacatactctggaatgattttacaccaaaaatatttccacaacttacttgctctcataggggtggatcgaagtcttaaaacttgaacaaacaatcaaagaaggttaagtgttctcggttctgacatctccatcagcgccacacactgtggcaacactgactaattacacagcaccaaggagggaacgatgatgccaagttactgcataatttaggtacattgtatgaaatggggctactgggtactttttacaaaatattgtgcaccatttggcagtagtttgtcaattaacttgtgtcaccaccatctgcaacagcatcaagattagatggatgatatttcacagaagacttagttacatgtgaatctttagagtgaccctggacaaacctggagaatactttgcaaaaggcttttctcctgattctttcacttccattgtgagtaattgct

SEQ ID NO: 72 - DNA, 1989 bp, homo sapien
gcggccgccgggactcttcctggagacaccgccatggccgggctatcccgcgggtccgcgcgcgcactgctcgccgccctgctggcgtcgacgctgttggcgctgctcgtgtcgcccgcgcggggtcgcggcggccgggaccacggggactgggacgaggcctcccggctgccgccgctaccaccccgcgaggacgcggcgcgcgtggcccgcttcgtgacgcacgtctccgactggggcgctctggccaccatctccacgctggaggcggtgcgcggccggcccttcgccgacgtcctctcgctcagcgacgggcccccgggcgcgggcagcggcgtgccctatttctacctgagcccgctgcagctctccgtgagcaacctgcaggagaatccatatgctacactgaccatgactttggcacagaccaacttctgcaagaaacatggatttgatccacaaagtcccctttgtgttcacataatgctgtcaggaactgtgaccaaggtgaatgaaacagaaatggatattgcaaagcattcgttattcattcgacaccctgagatgaaaacctggccttccagccataattggttctttgctaagttgaatataaccaatatctgggtcctggactactttggtggaccaaaaatcgtgacaccagaagaatattataatgtcacagttcagtgaagcagactgtggtgaatttagcaacacttatgaagtttcttaaagtggctcatacacacttaaaaggcttaatgtttctctggaaagcgtcccagaatattagccagttttctgtcacatgctggtttgtttgcttgcttgtttacttgcttgtttaccaatagagttgacctgttattggatttcctggaagatgtggtagctacttttttcctattttgaagccattttcgtagagaaatatccttcactataatcaaataagttttgtcccatcaattccaaagatgtttccagtggtgctcttgaagaggaatgagtaccagttttaaattgcccattggcatttgaaggtagttgagtatgtgttctttattcctagaagccactgtgcttggtagagtgcatcactcaccacagctgcctcctgagctgcctgagcctggtgcaaaaggattggcccccattatggtgcttctgaataaatcttgccaagatagacaaacaatgatgaaactcagatggagcttcctactcatgttgatttatgtctcacaatcctgggtattgttaattcaacatagggtgaaactatttctgataaagaacttttgaaaaactttttatactctaaagtgatactcagaacaaaagaaagtcataaaactcctgaatttaatttccccacctaagtcgagacagtattatcaaaacacatgtgcacacagattattttttggctccaaaactggattgcaaaagaaagaggagaagaatattttgtgtgttcctggtattcttttataagtaaagtttacccaggcatggaccagcttcagccagggacaaaatcccctcccaaaccactctccacagctttttaaaaatacttctactcttaacaattacctaaggcttcctcaactgccccaaatctcttaatagcttctagtgctgctacaatctaagtcaggtcaccagagggaagagaacatggcattaaaagaatcacatcttcagaagagaagacactaatattattacccatatacatgatttcagaagatgacataagattcctcttaaagaggaaatgtcaggaatcaagccactgaatccttaaagagaaaagttgaatatgagtcattgtgtctgaaaactgcaaagtgaacttaactgagatccagcaaacaggttctgtttaagaaaaataatttatactaaatttagtaaaatggacttcttattcaaagcatcaataattaaaagaattattttaaaaaaaaaaaaaaa

SEQ ID NO: 73 - DNA, 2433 bp, homo sapien
ggttctggaagacggcagagctgccgccattttgcgggaagaggaggcgctgtacctgcagtgctgcttttcttgcctagactctaggaactatccgagctccactccccacaacatactcaaaggaacggagagaaccgggacccccctgcggggacccggaactgatctgacaggatggcatctgatgactttgacatagtgattgaggccatgctggaagctccctataaaaaagaagaggatgagcaacaaaggaaagaagttaaaaaggattatcctagcaataccaccagcagcaccagcaacagtggcaatgagaccagtggaagcagcaccatcggggagacaagcaatcgtagtcgagatcgggatcggtatagacggagaaatagtcggagccgaagtccaggtcggcagtgtcgtcaccgtagccgtagctgggatcgtcgacatggtagtgagtcgcgaagtcgggaccatcgtcgtgaggatcgtgtgcattacaggagtcctccacttgccactggttatagatatggacacagtaagagtcctcatttcagagagaagagcccagtcagggagccagttgataatctgagtcctgaggagcgtgatgcccgcacagttttctgtatgcagttagctgcccgaattcggcctcgagatctggaggactttttctctgctgtaggcaaggttcgcgatgtacgtatcatttcagatcggaactcacgtcgttctaagggcattgcctacgtggaattctgtgaaatccagtctgtgccactggccattgggctgactgggcagcggttgctgggagtgcctatcattgtacaggcttcacaggcagagaaaaaccgactggcagccatggccaacaacctgcaaaagggcaatggtggaccaatgcgcctctatgtgggttccctgcacttcaatatcactgaagacatgctccggggcatctttgagccctttggtaaaattgataatattgtcctgatgaaggactcagatacaggccgctctaaaggttatggtttcatcacgttctctgattctgagtgtgcccggcgggccctggaacagttgaatgggtttgagcttgctggtcgacctatgagggttggccatgtgactgagcgactggatggtggcacagacatcacttttcctgatggggaccaggagctggatctgggatcagcaggtggacgttttcagctcatggcaaaactggcagaaggcgctggaatccaactgccaagcactgctgctgctgctgctgccgccgccgccgcccaggctgctgccttgcaactgaatggagcagttcccttgggggccctgaatccagcagctctgactgctctgagtccagccctgaaccttgcctcccagtgtttccagctctccagcctctttaccccccagaccatgtaaatcagtggcacagtatactgcctccttgtgcctctggatcctgccacttcacatctactcttccatggccccatttctccattttgtggaccaagccatcctgagggcatggacattgtctctgaggaaattggggccacccttaagataccaagaaaagctcctgcccatggtcccactggaaatggactctgctgagcaaagccaccagttgaagagaacagaatccacacctgcattgaatacctgtttctccatgtgtatcgtctctgagattaccttcttgccctttccaacaccttagtgattcctcaatttctcccccattgggaaggccatagggcattaactgaaggaactgacctctctccttttcctgtacctttaacctttagtctgtcaaggaaaacccttaggacctctgaatcaagaggactgagtttgtgggtgaaccttgaaggtgctctttctgctacaagggccctgggagatagcatggacgtgcattgagaagccagcctcagaccttagcttgaagcagcttgaggccagacctactgtagcctcagcatcttgctaggaggcatggaagtgatctatcctgccaggaggcctcagagtgatctgtcctgccaggaggtgtgagagtgatctgtcctgtgaggcatttaggggctttcaggaatttagtaaaaggtggagtatgcctttccagtatcttccatcttcctttgtatacttgtccttcctcccatttcctccctttggcccgaggtaggaggatggagggaggctgctactctaccacttcctgtgtgcctctactgtggcctcaaccctggcaattatagctactcccatcccttacctgggcatgtgtgagcccttctcactggattttatacccttgtgtctgtgtacataaatatatatacatatatatatacataaaaactttgtacaaaaaaaaaaaaaaaaaaa

SEQ ID NO: 74 - DNA, 1364 bp, homo sapien
atgtacgcctttgtgcggttcctggaggacaacgtctgctacgcgctgcccgtgtcgtgcgtgcgcgacttcagcccccgctcgcggctggattttgacaaccagaaggtgtacgccgtgtaccggggcccggaggaattgggcgccgggcccgagagccccccgcgcgccccccgcgactggggcgcgctgttgctccacaaggcccagatcctggcgctggcagaagacaaatctgaccttgaaaacagtgtgatgcagaagaaaataaaaatccccaagctttctcttaatcatgtagaagaagatggagaggttaaagattatggggaagaagatttacagcttagacacatcaaggattgtctggggaaatattgatctgcagtccaagaaaatcccagctgcccttgcctgaactgattctcgttgtcctacacagagacctgaggggcggaagccgagcgaagtggcgcacaagagcatcgaggcagtggtggctcggctagagaagcagaacggcctgagcctgggccatagcacgtgtccggaagaggtcttcgtggaggcctcgccaggcacagaggacatggacagtctagaagatgctgtggtgccccgggctctgtatgaggagctgctgcgcaactaccagcagcaacaggaagagatgcgccacctccagcaggagctggagcggactcggaggcagctggtacaacaggccaagaagctcaaggagtacggggcacttgtgtctgaaatgaaggagctccgtgaccttaaccggaggctccaggacgtgctgctcctgaggcttggcagcggtcccgccattgatctggaaaaagtaaagtcagaatgtctcgagcccgagccggagttacggagcactttcagtgaggaagcaaatacgtcgtcctattaccccgctcctgcgcctgtcatggacaagtatatcctagacaatggcaaggtccatctgggaagcgggatttgggttgatgaggagaaatggcaccagctacaagtaacccaaggagattccaagtacacgaagaacttggcagttatgatttggggaacagatgttctgaaaaacagaagcgtcacaggcgtcgccacaaaaaaaaagaaagatgcagtccctaaaccacccctctcgcctcgcaaactaagcatcgtcagagagtgtttgtatgacagaatagcacaagaaactgtggatgaaactgaaattgcacagagactctccaaagtcaacaagtacatctgtgaaaaaatcatggatatcaataaatcctgtaaaaatgaagaacgaagggaagcaaaatacaatttgcaataaactttggatttttcat

SEQ ID NO: 75 - DNA, 828 bp, homo sapien
gcagccaaattggagtcatcaagcctgctgaacctgatggggcagcttttgaacagctttctggaagtaagaacttcagtgaaaagccctttgatcgcttcagcccgggacatgcccttcagatggcttattctcagtaaagctttatgtagactgtgacactgtatatgtgtgactcgtacaactttgacgtgtttctgaagtggtttaatcgtattgttattagcttcttgtggaaatgcaatttttatactaaaaacattgcttatttgcaatgcaatatgttataaattgtggtttatattactggtattagtcttagcctaatgaacctaattatttttctttctgtattctttgcttcctcaaatagcatctgcagcaatgggaatgagaaatccagatatgtgtttcaagtagtacattgcctgaatcacaaatcacttgatcacagtatgcatataatccctgatcctattgtttcattttatgtaaattcccatttgcatcaaaacctaatgatagtgatggtaaggtaaaaaacaaaatggtgtatggttttcataccaagtgttttcacaagaagccatttggcctaggcagcaaaaaatattaattgtgcaaagaaaaaaagaaagaaaaaattttgggcggccttggccgtgaaaaagtttaaaacacatttgtgtggggcggccagtaggtaagtgacatgggcataaggtttccagagacaccggcagaatggttgggtttcaccaacaaaaagccggggacacgggtttaaaaccaggggttgggctatggtttaagggacgtaaaagaggg

SEQ ID NO: 76 - DNA, 1600 bp, homo sapien
ggccaaaagttgacttattttgaatggactacattatagcttaactagattgtacgagtgcttatcaactaatatgttaaaatatggtaattccttttttttttttttgagatggagtccagcctgggtgacagagtgagaccctatttcaaaaaaataaaaattggaagaagagcttaaaaaagataagattttaaagagtcccaagttatttaagttgagtgtaattgtcatttaaggaaggcaaatgagtttatcatccttcttaaagagcatctcttttaactgttggacaaaaccataactttgtcattttacaaggaagaacctcttaagaagtcctcagaaccagaagcaatgtgaactctcagcgctggtcctggtgggtttgctgaccatgactgggcaagccgttctttttgctgccatcttcctcatcataaagtgtggaacataggcaattgctttgagattcttggatagaagaggacaacattctgcacctgcccccttttttaaatctttggggaaagatgagtaactttccccactactctgccttcctgttcagtaactcttacttttgcctgaagtaacagcatcttctacttctccatctagagatttttgtgtgtgtgccatcaaggttagcaaactttatacgtagcctaacacttaaaaaatgcactcattatcttaaacctaataaattccagagtttattttggttctcctctgttgcccttcctaaaaaatgagctgaagatgacagtatttttctttacatgcttggttatgacttttaaagttttatttaaataaatgttgaagctcaagtttaaagaagcgttgcagaggcccacggtctcctgggtcccggccacctgtccatattccacatttgctgactgtgctccctgcactccactcaagttgagagttcaaatagtcttgaaggggaatcagcttcaggatggaaggacccaggagaggccccgaggtgggagggttctgtaaatacagactactgcgagtgtccagagctctctgccatgatacttccttgggactgacttggctgagaacgtgttctgtcagaggatttgttagaactctgcccttttgtctgaaactcaaggccaaggagaatgataggagacttaggacagagctgacccttgcaccaggctgggaggctgcagcccttttagatgccacttactgtaagtggccagaataccagagaggtgggttccatggtcaaatgcacagtaggtgtttacctttacatttggatcaccttgtagtctttaaattcttggtccctgaggccaagtccacaacttgccttctagtcacttgcctgcccgcagtggtggtggatgtgttagctggtagatttggaatcagtcaccagtctttctgtactgtcttggttagctctatataagtaggggcagcttagccctgaggcccagagacctgctgtcctttttctccttgagggaggaaataaaactgcggaatacaatgtccttccatagcatgggaagaagaaaataaacatctcctttccaacaaaaaaaaaaaaaaaaaaaaa

SEQ ID NO: 77 - DNA, 3618 bp, homo sapien
gtcggcgtaggtactttgaactcaagtaaacaaaagggaagattttctcgttgatactggagactgcacaacaatggggccacgaaagaaaagtgtgaaaacatgtatcatgaataatgaaattccagaagaaatgacagcagatgaaacaaaggactatatgaatcaactttcacatgaagtactttgccatatttttaggtacctccctctgcaggatatcatgtgtatggaatgtctttcccggaagctaaaggaagcagtgaccctatatctgcgagttgtgagagttgtagatctctgtgcagggcggtggtgggaatacatgccaagtggctttacagatgccagttttctaacactattaaagaagatgccagatgttgaacagctatatggccttcaccctcgataccttgagaggcgaagagtaaggggccatgaggcttttagcattccaggagtcctagaagctttgcaggcatgcccaaacttagtgggtgtggaaacttctcatttggagttggtagaatccatttggacatatatgccccatgttcatattttggggaaatttcgtaatcgtaatggagcttttccaattcctcctgaaaataaactgaaaattcctataggagccaaaattcaaactttacatttagttggggtgaatgttcctgaaattccttgtatcccaatgctaaggcacctttatatgaagtgggtaagactcactaaaccacagccatttaaagacttcctttgtatcagcttaagaactttcgtcatgaggaactgtgcaggacccacaaattccttgaaatatgtccctttagtaacaggcttagcctctgcccgaaacttggaacacttagaaatggttcgagttcctttccttggaggtcttatccaacatgttgttgaagacagttggagatcaggtggttttagaaatttgcacactattgttctgggagcttgcaaaaatgctcttgaagtagatcttggttacctcatcattactgctgcccgtaggttacatgaagttcggatccagccttccctaaccaaagatggtgtcttttctgccctaaagatggcagagttggagtttccccagtttgaaacccttcatctaggatatgtagatgagtttttgctacagagcagaatggctaatgcggatctggtgaagtatggtttggctgatgtggtagaaaatcctggtatcatcactgatatagggatgaaagcagtcaatgaagttttttcctgtatcaaatatctggcaatttacaattgccctcatctacacaacccatacaattggatctcagaccactcaagatggactcgattggttgatatcaacctagtacggtgccatgctttgaagctggactcttttggccagtttattgaattattacccagcctagagtttatttcactggatcagatgtttcgtgaaccacccaagggttgtgctcgagttggtctgagtgcaggcacaggaattggtgtttcatcagctcttgttagcaaccagaactccaacaatgacgataataatgcccagaataacaatgccaacatccacgacaacaatcaccatcatccagatgactcagacgaggagaatgactttcggcaagatctgcagccaggagagcagcagtttgcagctgacgcattaaatgagatggaagacatcgtccaagaagatggagaggtggtggccgagagtggaaataatactccagctcacagccaggcaattattcctgtggatgttgatgaggaacaagcaggacccagtggtcttcagcgtgtagtaaaaccaacctcaattactgttcatgattcagagagtgatgatgaagaagatagtctagaactccaagaagtctggattcctaagaacggtactcggcgttactctgaacgtgaagaaaaaactggagagtcagtgcagtccagagaattgtcagaagtagccaaaacaaagccacgtcacgccatgaaacggaagcggacagcagataaatccactagtacaagtgatcctgtgatcgaggatgaccatgtgcaggttcttgtattaaaatccaagaatcttgttggagtcactatgaccaattgtggaatcacagatctagtgctaaaagactgtccaaagatgatgttcatccatgctaccaggtgcagggtactaaaacatttaaaggtagaaaatgcaccaattgtaaaccgatttgactatgcacagtgcaagaaactgaacatggatcaggtactagaccagatactaagaatgccacccgagagaaaccgcatcatatacctacgcccaatgcagcaggtggacactctaactttggagcagaagctatttagtggtccctacccctatcacatctgtattatccatgaattcagtaaccctcccaatgtccggaataaggtgcgcattcgcagctggatggacactatagcaaacatcaatcaagagctcattaaatatgaattcttccctgaagccactcgaagtgaagaagacttaaagaaataccccaagtacccctgggggagagaaatctatactttagaaggtgttgtggatggagctccatattccatgatttctgacttcccttggctgaggtcattacgagctgcagagcccaacagcttcgctcgatacgactttgaagacgatgaagaaagcactatctatgctcctagaaggaaaggacagctgtctgcagacatctgtatggaaacaataggagaggaaatttcagagatgcgtcagatgaagaagggtgtatttcagcgagtagtggcaatttttatccactattgtgatgtcaatggagagccagttgaagatgactacatttaattggtccctcctcctttccagctattttgtcagaaagcaagtagggccatccagctgccagagtgctccacagggacttgaggcatgcagttgggaggtcctggctcggtttgctatatagggaatatataaggaacatcgaaattgtatacaaagatttgtacataaaaaatatacaaagacgcttcctaaagtaccaactttatatcatatgtttatacaatttaatttaaaaattcattttaaggaagacagataatttgaaagacttttgtttttcttgacttaattcatgaagtatcattttttgactgagtctccatttacttcattcttaatgattattgtcatccctttaaatctgtgcctttttcttcttgagcgaagctgtttgagtaaacctgttgaagagtgtttgtgtcttttgtgcttttttgttgttattaaaacaccaactaaaccttatagtcaagacaaggctctatgtttctgtacaaagctgtagttctttcttagtattatagttgccatgtttcttaaaatcaagtaaaaagacttatgagcttaaaaaaaagtgagtttgagagggaaatggaaaagtttccagagtatttctagtaatttatttccacattgaattgtgtatatgctttatcttgaatataaaataaaagtttattaaaaacttaaaaacaaaaaaaaaaaaaaaaaaa

SEQ ID NO: 78 - DNA, 1623 bp, homo sapien
gctggtttctgggggtcgtggccttgctcccgctgtgcgggaaaagaatccaggcccttccacgcgcgtgtgggtgcgggggccccgaagtgctcgtggttccccgctaggtctccgctggggcaggaaccggaatcatgggtgggaccaccagcacccgccgggtcaccttcgaggcggacgagaatgagaacatcaccgtggtgaagggcatccggctttcggaaaatgtgattgatcgaatgaaggaatcctctccatctggttcgaagtctcagcggtattctggtgcttatggtgcctcagtttctgatgaagaattgaaaagaagagtagctgaggagctggcattggagcaagccaagaaagaatccgaagatcagaaacgactaaagcaagccaaagagctggaccgagagagggctgctgccaatgagcagttaaccagagccatccttcgggagaggatatgtagcgaggaggaacgcgctaaggcaaagcacctggctaggcagctggaagagaaagaccgagtgctaaagaagcaggatgcattctacaaagaacagctggctagactggaggagaggagctcagagttctacagagtcaccactgaacaatatcagaaagctgctgaagaggtggaagcaaagttcaagcgatatgagtctcatccagtctgtgctgatctgcaggccaaaattcttcagtgttaccgtgagaacacccaccagaccctcaaatgctccgctctggccacccagtatatgcactgtgtcaatcatgccaaacagagcatgcttgagaagggaggataaaaactttcagaatgagcaaaacaccatcaacgttaattccagagatggaacattttttttcctagtgagaaaacaacccatttgaagagaagaccactaatgagaagaccactaaagagagacatcaagaatggattcagcagaatcatttcacgttttgaacagcagcagtttgaagggccaaagccttgatcagggatcagtcattaaaggacactcttgagtattagtaaaccctcttatgatgattaaaagagaagggcagccctctccaccttttggtactttctattcaacttgcactgaccataaaatgtttctcttctgaacaagccccatcatttggtgaacctccaccctaacaaagtaggatggggttgggggctaaattaattggagtggggcgaggagagagccagaaaacatagatccgagggcagcagtgctgggtggagagagccagaaaacagatctggaggcagcagtgctggatggaattgtctaggctgtggcatgttggttttgtctttcttttctcctttgattatgtaagagctatttcattataacttattatggtgattatacaggcaagaagacaaaaaggagagaaaatgtacctcttctactggaataatgtttatgattacaagtgagataaggtatttttatcaatatgaaggcaaccttggctgataaaacctctatagtgaatactcacatctttacttcactcactatcaataataaatatattttctgacaaagactggcaaaaaaaaaaaaaaaaaaaaaaaaaaaa

SEQ ID NO: 79 - DNA, 504 bp, homo sapien
aggcttagcctgaggtaagttaactgaatcacaggctgcagcagaaatactatttaaaatgtcacatagaaaattcaatttacactttgctttgccttttagtatctggatggcagatgacaggggttatgtggccaaattggtctttcccacctggcagcagctctcttgacacccacatcccttgttcgtcttcaaaagttcctcactgcctcagcgactatctcagccttcatgaacaaagtgctatgctgctataagtagttagaataaatgtgatttcagcttcatcgggtcctatcctttcaccttccttgtagctggtgtatgtcccacagtgcagccataaactatgaagcccagaagtatatgacttccactgaaactcaacatgccacacacaggtgcttgtgggcacagaagaagaaaggacaaatgtctgagcctcgggacttgcagcctctgcccttgctcctgacctccgtgttttgcccagatcagcag

SEQ ID NO: 80 - DNA, 2339 bp, homo sapien
gaactacaaagtttggtgtgtccactagtgtggtttcataccccctaggtcttgctgttgaggactggttctgccaggcatgatcaatgaccacccacaatgtcctgtggcccagcctgtggagaggtgcccaaacagagttatctgggtccacatccatgtgcccagctattctgtccaatcatagcacaaagacaggttgcctgtgtccagagggacacacagcctcaggcacaccagcccttacttatgagcttgatggtcatcagcaaagactctctccctttaggagggttctccttgggacttttcagtgtcttggcaggaaagagatggcacacacgaagcactgattgaagacagtttaatgaaagaatatttacagaggttgggcaagggtatggaaaacaacagggaacagtaaaacacccagggatgacaaggcaaggtagctcatgtctgtaatctcagcactttgggaggccaacacaggcagattgcttgagcccaggagtttgaaaccagcctggcaacataagcaagaatctgtttatctacaaaaaataaaataattaaaaaaaaattacctggctgtggtgttgcacacctatagtcccagctactcaggagtctgaggtgggaggatcacttgagtccaggagtttgaggttacaatgagctaggatcacactactgcactccagcctaggcgacaaagagagatgctgtctctaaaaataaaaaacaaaaacaaactacccaggaacaggcaggccaccaactgttaccatctcttgcctagagagacaaggagaaggatctagaacccagggagagctatagccatggagaaggagtcacccaatggaagccctggccacagctagaggatcaaaactcctgcacccactgcagctcagtaggaagagagctgggggaataaataccttgacctcttgcctcctgccctccaatctcctgtctgggtcttccattggccaaaaacaacagaagctaaaggtcaggggaccctgggtgatacggtccacataggcagcacactggagcaaaagaagaaaaaccagcacaattcatcttattaccacttagcagccattcacaaactttgcttagatgggagaaaaatattttgtccccggcacaggggaaacataaaatctcaccagcagccatattgtctgggggtgatagcaatttagtcccactccctcctgcaacttaaatcataatgtagccagtcccgggtaagtggaacacttcctgtaaagcacaactgctagtgcccccttctgtggctggtcatgaggcccagagtggtaactgcagtcttgttctcccaccacccattccatagcccctctactttctggcagtcccttagctgttggagaattttatctggtggaatgacccaaatcttcatccacagaggattcaaattcttagtgccgtgtcttcaatgagttgccacagtatccacagattcctaaagaacatgaagaggccttgaagatctcacctggaagctctgtaaaattatcagaaagaatagcaggtgctctagggcaacactactcaaactatggtccacggatggacagcattggcatctctggggagcttgttagaaatctaatttcatgcccccacctcaggcttacagaatgaggacaagggatacagggagtaccaagtgccctagcgaatcccagggttccaaagctagtactccttgcccctattgtgtagcagaaaccccactttcccttggatattggggttaaccatcctgacagtgcagtgatctctttctctgccaatatttcaacataaggagccccagatggcacaagatcatcttccaatttaacagacccataactatattccctggtggaagcagttcctcttggtcactagagatttccaaacccacaaaacctaaggtttcttggttaaaggccatgtttgtgggatatgctgagatgaatatgctgtggtttgaatgtgtcccccaaagttcatatgttggaaacttgattcccattgcaacagtgttgagatctggggcccaatgagaggtgattaggccatgagggcggagtgaatggattaatgcagttatctcaagagtgggtttgttatgaagggggtgtttggtcctcttttctctcttgcccatgtgattccttccaccatgtttatgatgcaacaagaaggtcctcaccagatgctggttccttgatcttgtattttgcagcctccaaaatcgtgagccaaataaatttctattcattataaaaaaaaaaaaaaaaaaa

SEQ ID NO: 81 - DNA, 2325 bp, homo sapien
acaaaacccgagagaggcgtgagcagcgctgtgtttgcgagcgggagcgaggggcgccggctggggtgtgtgctcctgagctcttcagaaaccaggctgctttcaggaacattgctgtggattcccagggcctattccactagaagcaagatggctgaactcaatactcatgtgaatgtcaaggaaaagatctatgcagttagatcagttgttcccaacaaaagcaataatgaaatagtcctggtgctccaacagtttgattttaatgtggataaagccgtgcaagcctttgtggatggcagtgcaattcaagttctaaaagaatggaatatgacaggaaaaaagaagaacaataaaagaaaaagaagcaagtccaagcagcatcaaggcaacaaagatgctaaagacaaggtggagaggcctgaggcagggcccctgcagccgcagccaccacagattcaaaacggccccatgaatggctgcgagaaggacagctcgtccacagattctgctaacgaaaaaccagcccttatccctcgtgagaaaaagatctcgatacttgaggaaccttcaaaggcacttcgtggggtcacagaaggcaacagactactgcaacagaaactatccttagatgggaaccccaaacctatacatggaacaacagagaggtcagatggcctacagtggtcagctgagcagccttgtaacccaagcaagcctaaggcaaaaacatctcctgttaagtccaatacccctgcagctcatcttgaaataaagccagatgagttggcaaagaaaagaggcccaaatattgagaaatcagtgaaggatttgcaacgctgcaccgtttctctaactagatatcgcgtcatgattaaggaagaagtggatagttccgtgaagaagatcaaaactgcctttgctgaattacacaactgcatcattgacaaagaagtttcattaatggcagaaatggataaagttaaagaagaagccatggaaatcctgactgctcgtcagaagaaagcagaagaactaaagagactcactgaccttgccagtcagatggcagagatgcagctggccgaactcagggcagaaattaagcactttgtcagcgagcgtaaatatgacgaggagctcgggaaagctgcccggttttcctgtgacatcgaacagctgaaggcccaaatcatgctctgcggagaaattacacatccaaagaacaactattcctcaagaactccctgcagctccctgctgcctctgctgaatgcgcacgcagcaacctctgggaaacagagtaacttttcccgaaaatcatccactcacaataagccctctgaaggcaaagcggcaaaccccaaaatggtgagcagtctccccagcaccgccgacccctctcaccagaccatgccggccaacaagcagaatggatcttctaaccaaagacggagatttaatccacagtatcataacaacaggctaaatgggcctgccaagtcgcagggcagtgggaatgaagccgagccactgggaaagggcaacagccgccacgaacacagaagacagccgcacaacggcttccggcccaaaaacaaaggcggtgccaaaaatcaagaggcttccttggggatgaagacccccgaggccccggcccattctgaaaagccccggcgaaggcagcacgctgcagacacctcggaggccaggcccttccggggtagtgtcggtagggtttcacagtgcaatctctgccccacgagaatagaagtttccacagatgcagcagttctctcagtcccggctgtgacgttggtggcctgagctaggaggaaaaagagcagttttcactcagttttggttccctgcccgaggtgctgacccaattcgctgccaaaagagtgtcaatcagaatatacaaatcccgtatggttgtgtcatcctctcttaatcatttttactaattctaataatcagctctagcttgcttcataattttcatggctttgcttgatctgttgatgctttctctcatcaagactttgctgcattttagccaggcagtatttactcattattaggaaaatcaagatgtggctgaagatcagaggctcagttagcaacctgtgttgtagcagtgatgtcagtccattgattgtctttagagagttaatgttacaaaaaagaattcttaataatcagacaaacatgatctgctgaggacacatgcgcttttgtagaatttaacatctggtgtttttctgaaaaaatatatatacatatattgctttatttgaaacaaattaaaatatgctgcatttg
